(19) United States
(12) Patent Application Publication
(10) Pub. No.: US 2004/0197799 A1
(43) Pub. Date: Oct. 7, 2004

(54) Determination of a genetic predisposition for behavioral disorders

(76) Inventors: Robert Williamson, Parkville (AU); Hans-Henrik Marstrand Dahl, Princes Hill (AU); Susan Mary Forrest, Kew (AU); Stephen Andrew Wilcox, Plenty (AU); Michelle Gina De Silva, Abbotsford (AU); Katherine Seymour Elliott, Elwood (AU); Michael Lynch, Sandringham (AU); Martin Delatycki, East Hawthorn (AU)

Correspondence Address: BAKER & BOTTS, 30 ROCKEFELLER PLAZA, NEW YORK, NY, 10112

(21) Appl. No.: 10/699,156

(22) Filed: Oct. 31, 2003

Related U.S. Application Data
(63) Continuation of application No. PCT/AU02/00556, filed on May 3, 2002.
(60) Provisional application No. 60/295,811, filed on Jun. 4, 2001.

(30) Foreign Application Priority Data
May 3, 2001 (AU) PR4756/01
Jun. 4, 2001 (AU) PR5426/01

(51) Int. Cl. C12Q 1/68

(52) U.S. Cl. 435/6

(57) ABSTRACT

The present invention relates generally to a molecular marker of a behavioral disorder such as but not limited to Attention Deficit Hyperactivity Disorder (ADHD) and to its use in the diagnosis of a behavioral disorder or an assessment of a likelihood that a subject may develop the behavioral disorder. A behavioral disorder also includes an intellectual disability. The molecular marker in essence determines the presence of genetic predisposition for development of the behavioral disorder, the development of which, or its degree of severity, may be further determined or exacerbated by environmental or social conditions. The molecular marker of the present invention may be in the form of a proteinaceous molecule or a genetic sequence. The ability to identify “at risk” individuals permits the implementation of medicinal, behavioral and/or personal management protocols to reduce the likelihood of development of, or to ameliorate one or more of the symptoms of, a behavioral disorder. The present invention contemplates, therefore, diagnostic assays and therapeutic agents in the prophylaxis and/or treatment of a behavioral disorder. The present invention further contemplates screening in utero as well as screening parents, or potential parents, for a likelihood of passing on a genetic predisposition to a behavioral disorder. The latter individuals or subjects identified as having a predisposition to the development of a behavioral disorder can then undergo behavioral modification protocols to control any development of a behavioral disorder.

[0001] The present application is a continuation of International Patent Application No. PCT/AU02/00556, filed May 3, 2002, published in English as International Publication No, WO02/090541 on Nov. 14, 2002, and claims priority to Australian Patent Application No. PR4756/01, filed May 3, 2001, Australian Patent Application No. PR5426/01, filed Jun. 4, 2001, and U.S. Provisional Application Serial No. 60/295,811, filed Jun. 4, 2001, all of which are incorporated herein by reference in their entirety.

### FIELD OF THE INVENTION

[0002] The present invention relates generally to a molecular marker of a behavioral disorder such as but not limited to Attention Deficit Hyperactivity Disorder (ADHD) and to its use in the diagnosis of a behavioral disorder or an assessment of a likelihood that a subject may develop the behavioral disorder. A behavioral disorder also includes an intellectual disability. The molecular marker in essence determines the presence of genetic predisposition for development of the behavioral disorder, the development of which, or its degree of severity, may be further determined or exacerbated by environmental or social conditions. The molecular marker of the present invention may be in the form of a proteinaceous molecule or a genetic sequence. The ability to identify “at risk” individuals permits the implementation of medicinal, behavioral and/or personal management protocols to reduce the likelihood of development of, or to ameliorate one or more of the symptoms of, a behavioral disorder. The present invention contemplates, therefore, diagnostic assays and therapeutic agents in the prophylaxis and/or treatment of a behavioral disorder. The present invention further contemplates screening in utero as well as screening parents, or potential parents, for a likelihood of passing on a genetic predisposition to a behavioral disorder. The latter individuals or subjects identified as having a predisposition to the development of a behavioral disorder can then undergo behavioral modification protocols to control any development of a behavioral disorder.

### BACKGROUND OF THE INVENTION

[0003] Reference to any prior art in this specification is not, and should not be taken as, an acknowledgment or any form of suggestion that this prior art forms part of the common general knowledge in any country.

[0004] The rapidly increasing sophistication of recombinant DNA technology is greatly facilitating research and development in the medical and allied health field. A particularly important area involves human genetics and the elucidation of the mechanisms underpinning inherited disorders or disorders having a genetic component. Behavioral disorders are particularly challenging and a prevalent example of this is Attention Deficit Hyperactivity Disorder (ADHD). Genetic association and linkage studies have previously failed to contribute significantly to understanding the genetic basis of behavioral or neuropsychiatric disorders. Although some positive findings have been reported, these are often closely followed by reports that refute the finding. This has certainly been the case for ADHD.

[0005] ADHD is one of the most commonly diagnosed behavioral disorders and is a significant burden on health systems. The prevalence of ADHD in the child population in the USA is 3-6% (Ballard et al., Adolescence 32(128): 855-862, 1997) and it is estimated that about 40% of children referred to mental health clinics show symptoms of ADHD. Progress in understanding the basis of ADHD has been hampered by a lack of consensus regarding its diagnosis, cause, prevalence, and treatment (Levy, BMJ 315(7113): 894-895, 1997).

[0006] Over the past two decades there have been 19 community-based studies in the USA offering estimates of prevalence ranging from 2% to 17%. The dramatic difference between these estimates is due to the choice of informant, methods of sampling and data collection and the diagnostic definition.

[0007] Treatment often requires trialing a number of stimulant medications until symptoms are alleviated.

[0008] There are currently no molecular markers of behavioral disorders such as, for example, ADHD.

[0009] In the work leading up to the present invention, the instant inventors investigated the molecular basis for behavioral disorders and in particular ADHD and, in accordance with the present invention, have identified molecular markers suitable for use in the diagnosis of a behavioral disorder or at least in assessing the risk of developing same. The “risk” constitutes the identification of a genetic predisposition of development of a behavioral disorder. The identification of the instant markers further facilitates the development of therapeutic protocols for treatment of such disorders.

### SUMMARY OF THE INVENTION

[0010] Throughout this specification, unless the context requires otherwise, the word “comprise”, or variations such as “comprises” or “comprising”, will be understood to imply the inclusion of a stated element or integer or group of elements or integers but not the exclusion of any other element or integer or group of elements or integers.

[0011] Nucleotide and amino acid sequences are referred to by a sequence identifier number (SEQ ID NO:). The SEQ ID NOs: correspond numerically to the sequence identifiers <400>1, <400>2, etc. A sequence listing is provided after the claims.

[0012] The gene “NHE7” which is referred to in the priority applications upon which the subject specification is based is now called “NHE”. The new nomenclature is adopted in the instant specification.

[0013] The present invention is predicated in part on the identification of a mutation on chromosome 3 which is associated with or co-incident to or which otherwise facilitates the development or progression, either alone or in association with environmental or other genetic factors, of a behavioral disorder such as but not limited to ADHD.

[0014] The present invention provides, therefore, a molecular marker of a behavioral disorder such as ADHD comprising, in a genetic form, a location on chromosome 3 or an equivalent location on another chromosome wherein a mutation at this location alone or in combination with environmental or other genetic factors is proposed to be associated with or otherwise facilitates the development or progression of the behavioral disorder. The location on chromosome 3 corresponds to two genes: the DOCK 3 (KIAA0299) gene and the NHE gene (also known as Homo sapiens solute carrier family 9 (sodium/hydrogen exchanger) isoform 8 (SLC9A8)) and formerly referred to as NHE7 in the priority applications of the subject specification. It is proposed that a mutation at DOCK 3 and/or NHE alone or in combination with environmental or other genetic factors is associated with or otherwise facilitates the development or progression of the behavioral disorder, such as but not limited to, ADHD.

[0015] The location on chromosome 3 is also in genetic proximity to three other genes: KIAA0800, HUMAGCGB and ARP (also known as ARMET). In addition to any disruption to DOCK 3 and/or NHE, the mutation at chromosome 3 may also cause some disruption to the function of these genes. Any disruption to DOCK 3 and/or NHE together with a disruption to the expression of KIAA0800, HUMAGCGB and/or ARP is further proposed to indicate a propensity for a subject to develop a behavioral disorder such as ADHD.

[0016] In yet a further embodiment, any of the aforementioned genes may represent a member of a genetic pathway or network or may encode products involved in a metabolic, physiological or neurological pathway. Accordingly, analysis of a possible disruption of these pathways at other genetic or gene-product locations is also proposed to provide an indication of a propensity for development of a behavioral disorder.

[0017] It is proposed that a mutation in any of the genes associated with the marker or in a gene or genetic sequence encoding a product or otherwise associated with a genetic, metabolic, neurological or physiological pathway involving DOCK 3 and/or NHE and optionally KIAA0800, HUMAGCGB and/or ARP is indicative of a genetic predisposition to the behavioral disorder, such a ADHD. A mutation in this context includes an insertion, substitution and/or deletion or an inversion and may result in no gene product, reduced amounts of a gene product, excess amounts of a gene product or a mutated gene product being produced.

[0018] Another aspect of the present invention provides a nucleic acid probe useful in a genetic assay for an aberration in DOCK 3 or NHE or other associated gene or genetic sequence.

[0019] Furthermore, the present invention contemplates an antibody for use in the diagnosis and/or treatment of a behavioral phenotype such as a disorder including but not limited to ADHD which specifically recognizes an epitope determined by a proteinaceous form of the subject molecular markers. The nucleic acid probe and/or the antibody are conveniently included in a kit for determining the presence of a genetic predisposition to a behavioral disorder.

[0020] A further aspect of the invention pertains to a composition for the treatment and/or prophylaxis of a behavioral phenotype such as but not limited to ADHD, the composition containing a nucleic acid molecule comprising a sequence of nucleotides which hybridizes under conditions of low stringency to a sequence of nucleotides comprising SEQ ID NO:1 and/or SEQ ID NO:2 and/or SEQ ID NO:12 and/or SEQ ID NO:14 and/or SEQ ID NO:20 and/or SEQ ID NO:22 or contained within SEQ ID NO:1 and/or SEQ ID NO:2 and/or SEQ ID NO:12 and/or SEQ ID NO:14 and/or SEQ ID NO:20 and/or SEQ ID NO:22 or a complementary or derivative from thereof and one or more acceptable carriers and/or excipients.

[0021] Yet another aspect of the invention pertains to a composition for the treatment and/or prophylaxis of a behavioral phenotype such as but not limited to ADHD, the composition containing a polypeptide or protein or peptide comprising a contiguous sequence of amino acids as set forth in SEQ ID NO:21 and/or SEQ ID NO:23 and/or SEQ ID NO:16 or SEQ ID NO:17 or SEQ ID NO:18 or an amino acid sequence having at least 70% similarity to any one of the above-mentioned sequences or a derivative thereof and one or more acceptable carriers and/or excipients.

[0022] The present invention further contemplates a method for diagnosing a behavioral phenotype or assessing the likelihood that a subject may develop a behavioral phenotype or otherwise has a genetic predisposition for development of a behavioral disorder such as but not limited to ADHD, the method comprising contacting a biological sample derived from said subject with a genetic form of a molecular marker comprising at least one of any one of SEQ ID NO:1 to SEQ ID NO:15 or SEQ ID NO:19 or SEQ ID NO:20 or SEQ ID NO:22 or a derivative thereof under conditions suitable for selective binding to occur.

[0023] In an alternative embodiment, the diagnosis is made by contacting a biological sample of a subject with a proteinaceous form of a molecular marker according to the present invention or antibodies thereto under conditions suitable for selective binding to occur.

[0024] In addition, another aspect of the present invention is directed to a method for screening a compound for an ability to ameliorate one or more symptoms of a behavioral phenotype in a human subject comprising administering one or more of said compounds to a genetically modified animal model of said behavioral phenotype and assessing the animal for changes consistent with the amelioration of one or more symptoms of said disorder.

[0025] The identification of DOCK 3 and NHE as candidate markers for a genetic predisposition for a behavioral disorder, such as ADHD, includes, as indicated above, the identification of a particular genetic or metabolic, physiological or neurological pathway wherein a disruption anywhere in this pathway may be indicative of a potential for development of a behavioral disorder. Once identified, appropriate behavioral modification protocols and/or therapeutic intervention can take place to reduce the likelihood of development of the behavioral disorder.

### BRIEF DESCRIPTION OF THE DRAWINGS

[0026] FIG. 1 is a schematic representation showing the pedigree of the family under investigation. The arrow indicates the index case. Carriers of the chromosome inversion are indicated by a shaded square in the top right hand corner of the symbol. Individuals marked with “N” had normal karyotypes and those with a query had not been karyotyped. Individuals with a confirmed clinical behavioral/developmental phenotype have a black box at the bottom left hand corner of their symbol. A grey box in the bottom left hand corner indicates a suspected behavioral/developmental phenotype not confirmed by clinical evaluation. Individuals indicated with an asterisk went on to further clinical assessment.

[0027] FIG. 2 is an ideogram of human chromosome 3. The diagram on the left represents a normal copy of human chromosome 3 and the diagram on the right depicts the inverted chromosome seen in the family of the study. The shaded area shows the extent of the inverted material.

[0028] FIG. 3 is a diagrammatic representation of the 3p breakpoint region. The two BAC clones that cross the breakpoint are shaded. The bars represent exons of the four genes mapping close to the breakpoint, i.e. the KIAA0299 gene, the ARP gene, the HUMAGCGB gene and the KIAA0800 gene.

[0029] FIG. 4 is a reproduction of a Southern blot of agarose gel separated restriction digest fragments of genomic DNA from two control individuals and the patient having the inverted chromosome. The normal sized band is seen in the patient lanes along with the altered band from the inverted chromosome. The difference in migration of the band in the middle lane of each triad is due to overloading of DNA for this control.

[0030] FIG. 5 is a diagrammatic representation of the KIAA0299 (DOCK 3) gene in the region of the 3p breakpoint. The top panel depicts the configuration of the breakpoint of the normal chromosome 3 and the bottom panel shows the scenario for the inverted chromosome. The grey bars represent exons of the genes beginning the numbering at 2, although this is not the true second exon of the gene. The arrow indicates the site of the breakpoint proper. The sequence to the right of the arrow is excised in the mutant chromosome, flipped around re-inserted next to 3q material as indicated by a horizontal line in the lower panel. The letter “E” stands for the restriction enzyme site EcoRI, “B” represents BamHI sites and “H” delineates HindIII sites. Sizes of the fragments seen on Southern analysis are indicated. The small horizontal bar represents the probe used on genomic Southern blots.

[0031] FIG. 6 is a schematic diagram of the inverse PCR method employed to identify unknown sequences of 3q origin from the inverted chromosome. The outward priming oligomers are indicated. Sequencing from primers directed towards the red line revealed the 3q sequence at the breakpoint.

[0032] FIG. 7 is a schematic diagram of the BAC/PAC contig across the 3q critical region with the breakpoint indicated by a star in the overlap between the clones RP11-56b20 (Bacpac Resources http://www.chori.org/bacpac/home.htm) and RP11-89n15. Sequence markers and known genes are indicated along the bottom of the horizontal axis.

[0033] FIG. 8 is a representation of BAC clone sequences across 3p breakpoint region (clones RP11-804h8, 646d13, 73i17. Sequences highlighted in grey are exons of the DOCK 3 gene. The 5′ end of the gene is towards the top of the page. The ATG start site is numbered as nucleotide one as the true transcription initiation site is unknown. The position of the breakpoint is indicated in bold, underlined type. Runs of “n” represent nucleotide sequences missing from the database. The size of the gaps in the sequence is unknown. The gene spans approximately 465 kb of genomic DNA. Exons from the ARP gene, the HUMAGCGB gene and some 3′ exons from the KIAA0800 gene are highlighted.

[0034] FIG. 9 is a representation of BAC clone sequences across 3q breakpoint region (clones RP11-20o3, 56b20, 89n15, PAC RP1-114b20, RP11-16p13, 165 m11 and 8j23). Sequences highlighted are exons of the NHE gene. The 5′ end of the gene is towards the bottom of the page. The ATG start site is in bold type and underlined. The position of the breakpoint is indicated in bold, underlined type. The gene spans approximately 470 kb of genomic DNA.

[0035] FIG. 10 is schematic representation of the p and q arm breakpoint sequences of the normal chromosome (SEQ ID NO:4 and SEQ ID NO:5 and SEQ ID NO:8 and SEQ ID NO:9 and SEQ ID NO:12 and SEQ ID NO:13) and an inverted chromosome (SEQ ID NO:6 and SEQ ID NO:7 and SEQ ID NO:10 and SEQ ID NO:11 and SEQ ID NO:14 and SEQ ID NO:15, respectively.

[0036] FIG. 11 is a representation of the amino acid sequences of KIAA0800 gene product (SEQ ID NO:16); HUMAGCGB gene product (SEQ ID NO:17) and ARP gene product (SEQ ID NO:1).

[0037] FIG. 12 is a representation of the nucleotide sequence of the probe used in to distinguish between normal and inverted chromosomes in Southern blot shown in FIG. 4.

[0038] FIG. 13 is a representation of the DOCK 3 gene nucleotide sequence (SEQ ID NO:20) from the 5′→3′ direction. There are 53 exons in total. The breakpoint lies between exons 19 and 20 and is marked with a vertical bar.

[0039] FIG. 14 is a representation of the NHE gene nucleotide sequence (SEQ ID NO:22) from the 5′→3′ direction. There are 16 exons in total. The breakpoint lines between exons 13 and 14 and is marked with a bar.

[0040] FIG. 15 is a photographic representation showing Northern blot analysis of a panel of tissues from adult human brain. A single message of 8.4 kb is seen for the DOCK 3 gene in all tissues examined except the spinal cord. The NHE probe hybridized to a single 3.5 kb species in all brain tissues examined. β-actin was used as a loading control. (1) Cerebellum; (2) cerebral cortex; (3) medulla; (4) spinal cord; (5) occipital lobe; (6) frontal lobe; (7) temporal lobe; and (8) putamen.

[0041] FIG. 16 is a photographic representation showing Northern blot analysis of a panel of adult human tissues. A single message of 8.4 kb is seen for the DOCK 3 gene and was detected only in the brain. Although more widely expressed, the NHE gene is also expressed in the brain. The NHE probe hybridized to a 3.5 kb species in all tissues examined except colon. In addition, the NHE probe hybridized to a larger, 7.5 kb band in skeletal muscle. β-actin was used as a loading control. (1) Brain [whole]; (2) heart; (3) skeletal muscle, (4) colon; (5) thymus; (6) spleen; (7) kidney; (8) liver; (9) small intestine; (10 placenta; (11) lung; and (12) peripheral blood leukocyte.

[0042] A summary of sequence identifiers used throughout the subject specification is provided in Table 1.

TABLE 1

| SE- | | |
|---|---|---|
| QUENCE | FIG- | |
| ID NO: | URE | DESCRIPTION |
| 1 | 8 | Nucleotide sequence of 3p breakpoint on normal |
| | | human chromosome 3 from clones BAC RP11-804h8 |
| 2 | 8 | Nucleotide sequence of 3p breakpoint on normal |
| | | human chromosome 3 from clones BAC RP11-804h8, |
| | | 646d'13, 73i17, 3f4 and 151d23 |
| 3 | 9 | Nucleotide sequence of 3q breakpoint region of |
| | | normal human chromosome 3 from BAC RP11-20o3, |
| | | 56b20, 89n15, BAC RP1-114b20, RP11-16p13, |
| | | 165mll and 8j23 |
| 4 | 10 | Nucleotide sequence of p-arm breakpoint on human |
| | | chromosome 3 |
| 5 | 10 | Complementary sequence to SEQ ID NO: 4 |
| 6 | 10 | Nucleotide sequence of q-arm breakpoint on human |
| | | chromosome 3 |
| 7 | 10 | Complementary sequence to SEQ ID NO: 6 |
| 8 | 10 | Nucleotide sequence of inverted p-arm on human |
| | | chromosome 3 |
| 9 | 10 | Complementary sequence to SEQ ID NO: 8 |
| 10 | 10 | Nucleotide sequence of inverted q-arm on human |
| | | chromosome 3 |
| 11 | 10 | Complementary sequence to SEQ ID NO: 10 |
| 12 | 10 | Nucleotide sequence of normal p-arm on human |
| | | chromosome 3 |
| 13 | 10 | Nucleotide sequence of inverted p-arm on human |
| | | chromosome 3 |
| 14 | 10 | Nucleotide sequence of normal q-arm on human |
| | | chromosome 3 |
| 15 | 10 | Nucleotide sequence of inverted q-arm on human |
| | | chromosome 3 |
| 16 | 11 | Amino acid sequence of KIAA0800 gene product |
| 17 | 11 | Amino acid sequence of HUMAGCGB gene product |
| 18 | 11 | Amino acid sequence of ARP gene product |
| 19 | 12 | Nucleotide sequence of probe used in Southern blot |
| | | hybridization of BAC 3f4 genetic region |
| 20 | 13 | Nucleotide sequence of human DOCK 3 gene |
| 21 | 13 | Amino acid sequence of DOCK 3 gene product |
| 22 | 14 | Nucleotide sequence of human NHE |
| 23 | 14 | Amino acid sequence of NHE gene product |

### DETAILED DESCRIPTION OF THE INVENTION

[0043] The present invention provides a molecular marker for a behavioral phenotype. The presence of one form of the marker is indicative of a low likelihood of the development of a behavioral disorder whereas another form is indicative of an increased risk of developing a behavioral disorder such as but not limited to Attention Deficit Hyperactivity Disorder (ADHD). A “behavioral phenotype” may be “normal” or classified as a “disorder”. The behavioral disorder may also include an environmental component in addition to a modified form of a molecular marker. The behavioral disorder in one form, is characterized by one or more behaviors such as but not limited to inattention, hyperactivity, impulsivity and/or intellectual disability. The latter includes subjects exhibiting a lower than average IQ. Consequently, in one form, the marker represents an altered nucleotide sequence leaving a subject predisposed to the development of a behavioral disorder depending on environmental, social and/or medical factors. Once a genetic predisposition is identified, it is proposed that behavioral modifying protocols and/or drugs may be used to facilitate socially acceptable behavior and/or to compensate for any intellectual disability. The former (socially acceptable behavior) constitutes behavioral patterns consistent with community standards in any given location regardless of the resistance of the particular individual concerned. The latter (intellectual disability) encompasses lower IQ values relative to well established standards.

[0044] Accordingly, as used herein, the term “a behavioral disorder”, such as but not limited to ADHD, broadly means a disorder which is associated or co-incident with or which is facilitated by the presence of one or more mutant forms of the present molecular markers notwithstanding that environmental conditions may influence the type and extent of the behavioral disorder. The term also includes a predisposition in a subject either to the development of a behavioral disorder such as but not limited to ADHD or to transmit the disorder, susceptibility to the disorder or carrier status for the disorder to an offspring. The markers, therefore, identify a genetic or metabolic, physiological and/or neurological predisposition towards development of a behavioral disorder. The term “behavioral disorder” as used herein includes intellectual disability, as well as inattention, hyperactivity and/or impulsivity.

[0045] The molecular marker may be in a genetic or proteinaceous form. Reference to genetic or proteinaceous forms includes the primary amino acid or nucleic acid sequence and a secondary structure, tertiary or later stage structure. Furthermore, the genetic marker may be a member of a genetic network or a proteinaceous form may be a member of a metabolic, physiological and/or neurological pathway. Consequently, another indication of a presence of or a predisposition for development of a behavioral disorder may be obtained by analyzing other members of the genetic or metabolic, physiological and/or neurological pathways. This can provide data which give an overall likelihood of a behavioral disorder or a likelihood of development of same.

[0046] The term “predisposition” is not to be construed as a subject not already having developed a behavioral disorder.

[0047] Accordingly, one aspect of the present invention provides a molecular marker of a behavioral disorder, said molecular marker, in a genetic form, comprises a genetic location on chromosome 3 or an equivalent location on another chromosome wherein a mutation at said location alone or in combination with environmental or other genetic factors is associated with or otherwise facilitates the development or progression of said behavioral disorder.

[0048] The molecular marker of the present invention may represent a “normal” polynucleotide sequence wherein an individual with such a sequence has a low risk of developing a behavioral disorder or a “mutant” polynucleotide sequence such as in an individual who has developed a behavioral disorder or has a high likelihood of developing a behavioral disorder. The normal and mutant polynucleotide sequences may include coding and intronic regions and intergenic regions (i.e. 3′ or 5′ regions) relative to a gene as well as nucleotide sequences which facilitate function or expression of a particular gene.

[0049] In a preferred embodiment, the genetic location is on chromosome 3 and is particularly associated with or comprises, or is otherwise genetically proximal to, a DOCK 3 gene or an NHE gene or both. A genetic location associated with DOCK 3 or NHE or both includes a genetic location which controls function or expression of a gene. A genetic location associated with DOCK 3 or NHE is considered to include genes in genetic proximity to DOCK 3 and/or NHE. Such genes include KIAA0800, ARP and HUMAGCGB. It is proposed that a mutation at or near DOCK 3 or NHE or involving both genes may also have an effect on one or more of KIAA0800, ARP and/or HUMAGCGB. Analysis of a disruption in DOCK 3 or NHE or both may, therefore, optionally further involve analysis of a disruption in KIAA0800, ARP and/or HUMAGCGB or other members of a genetic network or metabolic, physiological and/or neurological pathway in which any of the above genes are involved. Such analysis can result in an overall determination of the likelihood of the presence or predisposition of development of a behavioral disorder.

[0050] Reference herein to “genetically proximal” includes reference to a close physical distance such that the genetic sequence can function as a marker.

[0051] Accordingly, another aspect of the present invention contemplates a molecular marker of a behavioral disorder such as ADHD wherein said molecular marker, in genetic form, comprises a genetic location associated with a DOCK 3 gene or an NHE gene wherein a mutation at DOCK 3 or NHE alone or in combination with environmental or other genetic factors is associated with or otherwise facilitates the development or progression of said behavioral disorder.

[0052] In another embodiment, the present invention contemplates a molecular marker of a behavioral disorder, such as ADHD wherein said molecular marker, in genetic form, comprises a genetic location associated with a DOCK 3 gene or an NHE gene wherein a mutation at DOCK 3 or NHE alone or in combination with environmental or other genetic factors, such as a disruption in one or more of KIAA0800, ARP and/or HUMAGCGB is associated with or otherwise facilitates the development or progression of said behavioral disorder.

[0053] Where one form of the molecular marker constitutes a polynucleotide sequence, a mutant polynucleotide may comprise a single or multiple nucleotide substitution, addition and/or deletion or inversion and includes a polymorphism or natural variant. Another form would constitute a proteinaceous molecule or other gene product encoded by the genetic forms. The term “gene product” is used broadly to include RNA, mRNA, introns and exons. The present mutation may be dominant or recessive, somatic or germinal and may lead to loss of function or gain of function of a protein or other gene product encoded thereby. Furthermore, the mutation may be conditional and only cause the mutant phenotype under certain environmental conditions.

[0054] A particularly important mutation is a chromosome 3 inversion which, in accordance with the present invention, is associated or co-incident with or otherwise facilitates the development or progression of a behavioral disorder such as but not limited to ADHD. The inversion has been mapped and the p-arm and q-arm breakpoints have been sequenced. Polynucleotide molecular markers which map to the breakpoints on the inverted chromosome 3 and on the normal chromosome 3 have been identified and are described herein. These markers can now be used to assess or develop protocols for the assessment of a risk of a subject having or developing or transmitting a behavioral disorder.

[0055] The ability to identify at risk individuals permits the implementation of medicinal and/or behavioral protocols to reduce the likelihood of development of or to ameliorate one or more of the symptoms of a behavioral disorder.

[0056] In a particularly preferred embodiment, the mutation on chromosome 3 which is associated or co-incident with or which otherwise facilitates the development or progression of a behavioral disorder and particularly ADHD modulates the expression of one or more genes such as but not limited to DOCK 3 or NHE and optionally one or more of KIAA0800, ARP and/or HUMAGCGB.

[0057] The term “gene” is used in its broadest sense and includes cDNA corresponding to the exons of a gene. Accordingly, reference herein to a “gene” is to be taken to include:—

[0058] (i) a classical genomic gene consisting of transcriptional and/or translational regulatory sequences and/or a coding region and/or non-translated sequences (i.e. introns, 5′- and 3′-untranslated sequences); or

[0059] (ii) mRNA or cDNA corresponding to the coding regions (i.e. exons) and 5′- and 3′-untranslated sequences of the gene.

[0060] The term “gene” is also used to describe synthetic or fusion molecules encoding all or part of an expression product. In particular embodiments, the term “nucleic acid molecule” and “gene” may be used interchangeably.

[0061] The term “gene” is also used to describe synthetic, hybrid or fusion molecules encoding all or part of an expression product. In particular embodiments, the term “polynucleotide”, “nucleic acid molecule” and “gene” may be used interchangeably.

[0062] The term “modulates the expression of one or more genes” encompasses quantitative and qualitative changes in the expression product as well as up-regulation or down-regulation of transcription and/or translation. As known in the art, gene regulation may be upset by proximity to different genes and accordingly one or more genes in the vicinity of a mutation may be affected.

[0063] The molecular marker of the present invention is derived from chromosome 3 in humans or its functional equivalent on another chromosome or in another animal is within the scope of the present invention. A syntenic region is contemplated, therefore, from other organisms such as from primates, laboratory animals, livestock animals, companion animals and captured wild animals. In particular, a syntenic region from murine species may be conveniently predicted from available databases.

[0064] As used herein, the term “derived from” shall be taken to indicate that a particular integer or group of integers has originated from the source specified, but has not necessarily been obtained directly from the specified source.

[0065] A “mutation” or “modified” form of a genetic sequence includes a single or multiple nucleotide substitution, addition and/or deletion or inversion. An inversion is a particularly useful form of modification in terms of its use as a diagnostic indicator.

[0066] The inversion breakpoints on chromosome 3 of an individual (hereinafter referred to the as the “inverted chromosome”) have in accordance with the present invention been mapped to band p21.3 and band q21. Fluorescent In Situ Hybridization (FISH) analysis is conveniently used to identify BAC and/or YAC clones spanning these p-arm and q-arm breakpoints on normal chromosome 3. Clearly, however, other forms of analysis may be conducted.

[0067] In one embodiment, the instant inventors constructed a phage library from YAC clones spanning the p-arm breakpoint. PCR-based methods were used to screen the library for EST markers of genes in the region of the p-arm breakpoint. Although genes ARP, HUMAGCGB and KIAA0800 were identified in this region, the genes which were directly disrupted by the inversion were DOCK 3 and NHE. Three overlapping BAC clones identified as: BAC RP11-151d23, BAC RP11-3f4 and BAC RP11-89f17 (NCBI, Bethesda, Md.; http://www.ncbi.nlm.nih.gov/) were obtained encompassing this region.

[0068] Further FISH and Southern blot analyses demonstrated that the breakpoint on the p-arm was located within the DOCK3 gene. The region flanking the p-arm breakpoint has been sequenced.

[0069] Example 6 describe the expression of DOCK 3 and NHE in the brain. Without limitation to any particular mode of operation, it is contemplated that mutation in the DOCK 3 and/or NHE gene leads to modified expression of DOCK 3 and/or NHE or a modified expression product at least in the brain, which is associated with or otherwise facilitates the development or progression of a behavioral disorder or the risk of developing same.

[0070] Reference to a modified expression product includes loss of any product. An expression product may be inter alia a protein, RNA, mRNA, intron or exon.

[0071] Not wishing to limit the present invention to any one method or manner of performance, in one embodiment, an inverse PCR strategy was performed to identify the unknown sequences of the 3q-arm breakpoint based on the new sequence information from the 3p breakpoint. Pursuant to this strategy, it was determined that the 3q breakpoint was flanked by BAC clones RP11-89n15 and RP11-56b20. Within this region, an EST with homology to a Sodium/Hydrogen Ion-Exchanger family was identified. In accordance with the present invention, the gene has been termed NHE. The region flanking the q-arm breakpoint has been sequenced.

[0072] Contigs flanking the p-arm and q-arm breakpoints on chromosome 3 and genes in the region have been developed. The p-arm contig is exemplified in SEQ ID NO:1 and SEQ ID NO:2 and the q-arm contig is exemplified in SEQ ID NO:3. The sequences SEQ ID NO:1 and SEQ ID NO:2 are overlapping sequences.

[0073] Accordingly, yet another aspect of the present invention provides a molecular marker of a behavioral phenotype, said molecular marker comprising, in a genetic form, a nucleotide sequence or modified form thereof or an expression product encoded thereby, said nucleotide sequence derived from the p-arm of chromosome 3 and comprising or contained within a sequence of nucleotides which hybridizes under conditions of low stringency to a sequence of nucleotides exemplified in SEQ ID NO:1 or SEQ ID NO:2 or a complementary form thereof or having at least 60% similarity to either SEQ ID NO:1 or SEQ ID NO:2 wherein the presence of a modified form of said molecular marker is indicative of a behavioral disorder or the likelihood that a subject may develop a behavioral disorder.

[0074] Still another aspect of the present invention provides a molecular marker of a behavioral phenotype, said molecular marker, in a genetic form, comprising a genetic sequence or modified form thereof or an expression product encoded thereby, said nucleotide sequence derived from the q-arm of chromosome 3 and comprising or contained within a sequence of nucleotides which hybridizes under conditions of low stringency to a sequence of nucleotides exemplified in SEQ ID NO:3 or a complementary form thereof or having at least 60% similarity thereto wherein the presence of a modified form of said molecular marker is indicative of a behavioral disorder or the likelihood that a subject may develop a behavioral disorder.

[0075] The present invention further contemplates a molecular marker comprising nucleotide sequence derived from the inverted chromosome. The nucleotide sequence of the q-arm of an inverted chromosome are shown in SEQ ID NO:10 and SEQ ID NO:11 and SEQ ID NO:15. The nucleotide sequence on the p-arm are shown in SEQ ID NO:8 and SEQ ID NO:9 and SEQ ID NO:14.

[0076] Accordingly, yet another aspect of the present invention provides a molecular marker of a behavioral phenotype, said molecular marker, in a genetic form, comprising nucleotide sequence derived from the q-arm of chromosome 3 and comprising or contained within a sequence of nucleotides set forth in SEQ ID NO:10 and SEQ ID NO:11 and/or SEQ ID NO:15 or which hybridizes under conditions of low stringency to SEQ ID NO:10 or SEQ ID NO:11 or SEQ ID NO:15 or a complementary form thereof or having at least 60% similarity thereto wherein the presence of this sequence is indicative of a subject having a behavioral disorder or having a predisposition for development of a behavioral disorder.

[0077] In another embodiment, the present invention provides a molecular marker of a behavioral phenotype, said molecular marker, in a genetic form, comprising nucleotide sequence derived from the p-arm of chromosome 3 and comprising or contained within a sequence of nucleotides set forth in SEQ ID NO:8 and SEQ ID NO:9 and/or SEQ ID NO:14 or which hybridizes under conditions of low stringency to SEQ ID NO:8 or SEQ ID NO:9 or SEQ ID NO:14 or a complementary form thereof or having at least 60% similarity thereto wherein the presence of this sequence is indicative of a subject having a behavioral disorder or having a predisposition for development of a behavioral disorder.

[0078] Reference herein to a low stringency includes and encompasses from at least about 0 to at least about 15% v/v formamide and from at least about 1 M to at least about 2 M salt for hybridization, and at least about 1 M to at least about 2 M salt for washing conditions. Generally, low stringency is at from about 25-30° C. to about 42° C. The temperature may be altered and higher temperatures used to replace formamide and/or to give alternative stringency conditions. Alternative stringency conditions may be applied where necessary, such as medium stringency, which includes and encompasses from at least about 16% v/v to at least about 30% v/v formamide and from at least about 0.5 M to at least about 0.9 M salt for hybridization, and at least about 0.5 M to at least about 0.9 M salt for washing conditions, or high stringency, which includes and encompasses from at least about 31% v/v to at least about 50% v/v formamide and from at least about 0.01 M to at least about 0.15 M salt for hybridization, and at least about 0.01 M to at least about 0.15 M salt for washing conditions. In general, washing is carried out Tₘ=69.3+0.41 (G+C)% (Marmur and Doty, j. Mol. Biol. 5: 109, 1962). However, the Tₘ of a duplex DNA decreases by 1° C. with every increase of 1% in the number of mismatch base pairs (Bonner and Laskey, Eur. J. Biochem. 46(1). 83-88, 1974). Formamide is optional in these hybridization conditions. Accordingly, particularly preferred levels of stringency are defined as follows: low stringency is 6×SSC buffer, 0.1% w/v SDS at 25-42° C.; a moderate stringency is 2×SSC buffer, 0.1% w/v SDS at a temperature in the range 20° C. to 65° C.; high stringency is 0.1×SSC buffer, 0.1% w/v SDS at a temperature of at least 65° C.

[0079] The term “similarity” as used herein includes exact identity between compared sequences at the nucleotide or amino acid level. Where there is non-identity at the nucleotide level, “similarity” includes differences between sequences which result in different amino acids that are nevertheless related to each other at the structural, functional, biochemical and/or conformational levels. Where there is non-identity at the amino acid level, “similarity” includes amino acids that are nevertheless related to each other at the structural, functional, biochemical and/or conformational levels. In a particularly preferred embodiment, nucleotide and sequence comparisons are made at the level of identity rather than similarity.

[0080] Terms used to describe sequence relationships between two or more polynucleotides or polypeptides include “reference sequence”, “comparison window”, “sequence similarity”, “sequence identity”, “percentage of sequence similarity”, “percentage of sequence identity”, “substantially similar” and “substantial identity”. A “reference sequence” is at least 12 but frequently 15 to 18 and often at least 25 or above, such as 30 monomer units, inclusive of nucleotides and amino acid residues, in length. Because two polynucleotides may each comprise (1) a sequence (i.e. only a portion of the complete polynucleotide sequence) that is similar between the two polynucleotides, and (2) a sequence that is divergent between the two polynucleotides, sequence comparisons between two (or more) polynucleotides are typically performed by comparing sequences of the two polynucleotides over a “comparison window” to identify and compare local regions of sequence similarity. A “comparison window” refers to a conceptual segment of typically 12 contiguous residues that is compared to a reference sequence. The comparison window may comprise additions or deletions (i.e. gaps) of about 20% or less as compared to the reference sequence (which does not comprise additions or deletions) for optimal alignment of the two sequences. Optimal alignment of sequences for aligning a comparison window may be conducted by computerised implementations of algorithms (GAP, BESTFIT, FASTA, and TFASTA in the Wisconsin Genetics Software Package Release 7.0, Genetics Computer Group, 575 Science Drive Madison, Wis., USA) or by inspection and the best alignment (i.e. resulting in the highest percentage homology over the comparison window) generated by any of the various methods selected. Reference also may be made to the BLAST family of programs as, for example, disclosed by Altschul et al. (Nucleic Acids Res. 25(17): 3389-3402, 1997). A detailed discussion of sequence analysis can be found in Unit 19.3 of Ausubel et al. (“Current Protocols in Molecular Biology”, John Wiley & Sons, Inc., Chapter 15, 1994-1998).

[0081] The terms “sequence similarity” and “sequence identity” as used herein refers to the extent that sequences are identical or functionally or structurally similar on a nucleotide-by-nucleotide basis or an amino acid-by-amino acid basis over a window of comparison. Thus, a “percentage of sequence identity”, for example, is calculated by comparing two optimally aligned sequences over the window of comparison, determining the number of positions at which the identical nucleic acid base (e.g. A, T, C, G, I) or the identical amino acid residue (e.g. Ala, Pro, Ser, Thr, Gly, Val, Leu, Ile, Phe, Tyr, Trp, Lys, Arg, His, Asp, Glu, Asn, Gln, Cys and Met) occurs in both sequences to yield the number of matched positions, dividing the number of matched positions by the total number of positions in the window of comparison (i.e., the window size), and multiplying the result by 100 to yield the percentage of sequence identity. For the purposes of the present invention, “sequence identity” will be understood to mean the “match percentage” calculated by the DNASIS computer program (Version 2.5 for windows; available from Hitachi Software engineering Co., Ltd., South San Francisco, Calif., USA) using standard defaults as used in the reference manual accompanying the software. Similar comments apply in relation to sequence similarity.

[0082] The presence of genetic forms of molecular markers may be identified using any suitable protocol such as heteroduplex analysis, polymerase chain reaction (PCR), ligase chain reaction (LCR), sequence specific hybridization probes (SSO), single-stranded conformational polymorphism (SSCP), sequencing, mass spectrometry, enzyme cleavage and combinations of these.

[0083] Methods for assessing whether or not an association or significant correlation exists between a mutation in a gene and a particular phenotype are well known to those skilled in the art. Thus, another aspect of the present invention contemplates a method for screening for a mutation which is associated or co-incident with or which otherwise facilitates the development or progression of a behavioral disorder such as ADHD, said method comprising screening for a mutation in genetic sequences encoding a DOCK 3 gene or NHE gene wherein said mutation is shared by subjects having said behavioral disorder or which have a propensity to develop said disorder.

[0084] Reference to “contained within a sequence of nucleotides” encompasses fragments of the exemplified polynucleotide sequences. When genomic sequences are exemplified, reference to fragments includes reference to the full length mRNA encoded by the genomic sequences. The term fragments is used in a broad sense and includes reference to relatively short contiguous portions of the sequence for use as PCR primers or probes or the like as well as reference to full length genes. Fragments may range from about 10 bp to about 400 kb, from about 100 bp to about 1 kb, from about 500 bp to 5 kb, from about 900 bp to 100 kb, from about 80 kb to about 200 kb.

[0085] Derivatives of the genetic forms of the isolated molecular markers are clearly contemplated by the present invention. Generally, functional derivatives are preferred and derivatives with enhanced function. For example, derivative oligonucleotides having one or more nucleotide mutations or modifications which improve stability, hybridization and/or detection are contemplated. Derivatives also includes homologues, analogues, mimetics and variants.

[0086] Complementary sequences to the coding strand are provided for use as probes or primers or for modulating the level of expression of an endogenous gene. For example, a gain of function mutation may be suppressed by antisense or ribozyme molecules based on technology known in the art.

[0087] The present invention therefore provides nucleic acid molecules comprising breakpoint sequences for use in diagnosis for a behavioral disorder or at least of assessing the risk of developing same. For example, the detection of a normal breakpoint sequence is indicative of a low likelihood of the development of a behavioral disorder such as but not limited to ADHD while, the presence of the inverted chromosome breakpoint sequences is indicative of an increased risk of developing such a phenotype. A diagnostic test based on these sequences could take any one or more of the diverse forms known in the art including a PCR or affinity-based test or a cytogenetic test. Diagnosis may take place at any age including in utero. Genetic testing to determine the risk of a subject or family member developing certain disorders is becoming more commonplace and is explicitly contemplated.

[0088] Genetic sequences encoding genes which are affected by the mutant forms of the molecular markers described herein are preferred embodiments of the present invention. And, in a related embodiment, the proteins encoded by the normal or mutant polynucleotides are provided.

[0089] Gene replacement and genetic constructs designed to add, delete, supplement and/or manipulate genes affected by the present mutant polynucleotides is also contemplated. In one embodiment the therapeutic gene is delivered to the brain.

[0090] In one embodiment, the marker comprising the nucleotide and amino acid sequence of DOCK 3 which is shown in FIG. 13 and SEQ ID NOs:20 and 21, respectively. FIG. 8 also provides the intron:exon boundaries and genomic sequence for DOCK 3.

[0091] Accordingly, yet another related aspect of the present invention provides a molecular marker of a behavioral phenotype, said molecular marker comprising, in a genetic form, a nucleotide sequence or modified form thereof, or an expression product encoded thereby, said nucleotide sequence derived from the p-arm of chromosome 3 and comprising or contained within a sequence of nucleotides which hybridizes under conditions of low stringency to a nucleic acid molecule encoding all or part of the gene product whose amino acid sequence is set forth in SEQ ID NO:21 and wherein the presence of a modified form of said molecular marker is indicative of a behavioral disorder or the likelihood that a subject may develop a behavioral disorder.

[0092] In a related embodiment, there is provided a molecular marker of a behavioral phenotype, said molecular marker comprising, in a genetic form, a nucleotide sequence or modified form thereof, or an expression product encoded thereby, said nucleotide sequence derived from the p-arm of chromosome 3 and comprising or contained within a sequence of nucleotides which hybridizes under conditions of low stringency to a nucleic acid molecule comprising the nucleotide sequence set forth in SEQ ID NO:20 or its complementary form wherein said molecular marker is indicative of a behavioral disorder or the likelihood that a subject may develop a behavioral disorder.

[0093] In an alternative embodiment, the marker comprises the nucleotide sequence and corresponding amino acid sequence of NHE as shown in FIG. 14 and SEQ ID NOs:22 and 23, respectively.

[0094] Accordingly, another related aspect of the present invention provides a molecular marker of a behavioral phenotype, said molecular marker comprising, in a genetic form, a nucleotide sequence or modified form thereof, or an expression product encoded thereby, said nucleotide sequence derived from the p-arm of chromosome 3 and comprising or contained within a sequence of nucleotides which hybridize under conditions of low stringency to a nucleic acid molecule encoding all or part of the gene product whose amino acid sequence is set forth in SEQ ID NO:22 and wherein the presence of a modified form of said molecular marker is indicative of a behavioral disorder or the likelihood that a subject may develop a behavioral disorder.

[0095] In a related embodiment, there is provided a molecular marker of a behavioral phenotype, said molecular marker comprising, in a genetic form, a nucleotide sequence or modified form thereof, or an expression product encoded thereby, said nucleotide sequence derived from the p-arm of chromosome 3 and comprising or contained within a sequence of nucleotides which hybridize under conditions of low stringency to a nucleic acid molecule comprising the nucleotide sequence set forth in SEQ ID NO:23 or its complementary form, said molecular marker is indicative of a behavioral disorder or the likelihood that a subject may develop a behavioral disorder.

[0096] Genes associated with the molecular marker of the present invention include KIAA0800, HUMAGCGB and ARP. A further aspect of the present invention provides for determining whether any of these genes have been disrupted in individuals with a behavioral disorder.

[0097] Accordingly, a further aspect of the present invention provides a molecular marker of a behavioral phenotype, said molecular marker comprising, in a genetic form, a nucleotide sequence or modified form thereof, or an expression product encoded thereby, said genetic sequence derived from the chromosome 3 and comprising or contained within a sequence of nucleotides which hybridize under conditions of low stringency to a nucleic acid molecule encoding all or part of the gene product whose amino acid sequence is set forth in one or more of SEQ ID NO:16 (KIAA0800), SEQ ID NO:17 (HUMAGCGB) and/or SEQ ID NO:18 (ARP) and wherein the presence of a modified form of said molecular marker is indicative of a behavioral disorder or the likelihood that a subject may develop a behavioral disorder. This is particularly the case when there is a modification to DOCK 3 and/or NHE.

[0098] The proteinaceous form of the molecular marker of the present invention includes normal polypeptides or proteins and mutant polypeptides or proteins. By “normal polypeptides” is meant forms of the polypeptide which are not associated with a behavioral disorder while “mutant polypeptides” refers broadly to one or more forms of the polypeptide which are associated with the development or progression of a behavioral disorder. A mutant polypeptide includes polypeptides or peptides encoded by the mutant polynucleotides of the preset invention. A mutant polypeptide includes the case where no polypeptide is made as well as when a non-sense polypeptide is produced due to non-contiguous nucleotide sequences being fused together. Mutation detection methods such as the protein truncation test (PTT) or methods relying on altered electrophoretic ability may conveniently be used in the assessment or screening for mutant polypeptides.

[0099] Homologues and derivatives of the isolated or recombinant proteinaceous molecular markers described herein are contemplated. The term derivatives, in this context includes fragments, parts, portions, mutants, homologues and analogues. Derivatives also include single or multiple amino acid substitutions, deletions and/or additions. “Additions” to amino acids include fusions with other peptides, polypeptides or proteins or fusions to nucleotide sequences. Derivatives may be from about 10 amino acids to about 10,000 amino acids in length, from about 30 amino acids to about 300 amino acids, from about 70 to about 5000 amino acids or from about 100 amino acids to about 700 amino acids. Reference herein to the proteinaceous molecular markers includes reference to all derivatives thereof including functional and non-functional derivatives, peptides and polypeptides. Preferably, the derivative has enhanced function for diagnosis, prophylaxis or therapy including immunotherapy of a behavioral disorder such as ADHD.

[0100] The amino acid sequence of proteinaceous forms of the present molecular marker are exemplified in SEQ ID NO:21 (DOCK 3 gene product) and SEQ ID NO:23 (NHE gene product) SEQ ID NO:17 (HUMAGCGB gene product); SEQ ID NO:18 (ARP gene product) and SEQ ID NO:16 (KIA0800 gene product).

[0101] The present invention provides, therefore, genetic probes such as oligonucleotides to screen for the molecular markers on chromosome 3 or its equivalent.

[0102] In another embodiment, the present invention contemplates antibody reagents for use in the diagnosis and/or treatment of a behavioral phenotype such as but not limited to ADHD which specifically recognize an epitope determined by a proteinaceous form of the subject molecular markers.

[0103] Antibodies to a proteinaceous form of a molecular marker of the present invention may be monoclonal or polyclonal. Alternatively, fragments of antibodies may be used such as Fab fragments. Furthermore, the present invention extends to recombinant and synthetic antibodies and to antibody hybrids. A “synthetic antibody” is considered herein to include fragments and hybrids of antibodies. Antibodies may also be used to distinguish between “normal” polypeptides and “mutant” polypeptides.

[0104] In one embodiment, specific antibodies can be used to screen for a proteinaceous form of a molecular marker. The latter would be important, for example, as a means for screening for levels of a molecular marker in a cell extract or other biological fluid or purifying a proteinaceous form of a molecular marker made by recombinant means from culture supernatant fluid. Techniques for the assays contemplated herein are known in the art and include, for example, sandwich assays and ELISA.

[0105] It is within the scope of this invention to include any second antibodies (monoclonal, polyclonal or fragments of antibodies or synthetic antibodies) directed to the first mentioned antibodies discussed above. Both the first and second antibodies may be used in detection assays or a first antibody may be used with a commercially available anti-immunoglobulin antibody. An antibody as contemplated herein includes any antibody specific to any region of a proteinaceous form of a molecular marker.

[0106] Both polyclonal and monoclonal antibodies are obtainable by immunization with the enzyme or protein and either type is utilizable for immunoassays. The methods of obtaining both types of sera are well known in the art. Polyclonal sera are less preferred but are relatively easily prepared by injection of a suitable laboratory animal with an effective amount of a proteinaceous form of a molecular marker, or antigenic parts thereof, collecting serum from the animal, and isolating specific sera by any of the known immunoadsorbent techniques. Although antibodies produced by this method are utilizable in virtually any type of immunoassay, they are generally less favoured because of the potential heterogeneity of the product.

[0107] The use of monoclonal antibodies in an immunoassay is particularly preferred because of the ability to produce them in large quantities and the homogeneity of the product. The preparation of hybridoma cell lines for monoclonal antibody production derived by fusing an immortal cell line and lymphocytes sensitized against the immunogenic preparation can be done by techniques which are well known to those who are skilled in the art.

[0108] Another aspect of the present invention contemplates a method for detecting a proteinaceous form of a molecular marker in a biological sample from a subject said method comprising contacting said biological sample with an antibody specific for a proteinaceous form of a molecular marker or its derivatives or homologues for a time and under conditions sufficient for an antibody-molecular marker complex to form, and then detecting said complex.

[0109] The presence of a proteinaceous form of a molecular marker may be accomplished in a number of ways such as by Western blotting and ELISA procedures. A wide range of immunoassay techniques are available as can be seen by reference to U.S. Pat. Nos. 4,016,043, 4,424,279 and 4,018,653. These, of course, includes both single-site and two-site or “sandwich” assays of the non-competitive types, as well as in the traditional competitive binding assays. These assays also include direct binding of a labelled antibody to a target.

[0110] Sandwich assays are among the most useful and commonly used assays and are favoured for use in the present invention. A number of variations of the sandwich assay technique exist and all are intended to be encompassed by the present invention. Briefly, in a typical forward assay, an unlabelled antibody is immobilized on a solid substrate and the sample to be tested brought into contact with the bound molecule. After a suitable period of incubation, for a period of time sufficient to allow formation of an antibody-antigen complex, a second antibody specific to the antigen, labelled with a reporter molecule capable of producing a detectable signal is then added and incubated, allowing time sufficient for the formation of another complex of antibody-antigen-labelled antibody. Any unreacted material is washed away, and the presence of the antigen is determined by observation of a signal produced by the reporter molecule. The results may either be qualitative, by simple observation of the visible signal, or may be quantitated by comparing with a control sample containing known amounts of hapten. Variations on the forward assay include a simultaneous assay, in which both sample and labelled antibody are added simultaneously to the bound antibody. These techniques are well known to those skilled in the art, including any minor variations as will be readily apparent. In accordance with the present invention, the sample is one which might contain a proteinaceous form of a molecular marker including cell extract, tissue biopsy or possibly serum, saliva, mucosal secretions, lymph, tissue fluid and respiratory fluid. The sample is, therefore, generally a biological sample comprising biological fluid but also extends to fermentation fluid and supernatant fluid such as from a cell culture.

[0111] In the typical forward sandwich assay, a first antibody having specificity for a proteinaceous form of a molecular marker or antigenic parts thereof, is either covalently or passively bound to a solid surface. The solid surface is typically glass or a polymer, the most commonly used polymers being cellulose, polyacrylamide, nylon, polystyrene, polyvinyl chloride or polypropylene. The solid supports may be in the form of tubes, beads, discs of microplates, or any other surface suitable for conducting an immunoassay. The binding processes are well-known in the art and generally consist of cross-linking, covalently binding or physically adsorbing, the polymer-antibody complex is washed in preparation for the test sample. An aliquot of the sample to be tested is then added to the solid phase complex and incubated for a period of time sufficient (e.g. 2-40 minutes or where more convenient, overnight) and under suitable conditions (e.g. for about 20° C. to about 40° C.) to allow binding of any subunit present in the antibody. Following the incubation period, the antibody subunit solid phase is washed and dried and incubated with a second antibody specific for a portion of the hapten. The second antibody is linked to a reporter molecule which is used to indicate the binding of the second antibody to the hapten.

[0112] An alternative method involves immobilizing the target molecules in the biological sample and then exposing the immobilized target to specific antibody which may or may not be labelled with a reporter molecule. Depending on the amount of target and the strength of the reporter molecule signal, a bound target may be detectable by direct labelling with the antibody. Alternatively, a second labelled antibody, specific to the first antibody is exposed to the target-first antibody complex to form a target-first antibody-second antibody tertiary complex. The complex is detected by the signal emitted by the reporter molecule.

[0113] By “reporter molecule” as used in the present specification, is meant a molecule which, by its chemical nature, provides an analytically identifiable signal which allows the detection of antigen-bound antibody. Detection may be either qualitative or quantitative. The most commonly used reporter molecules in this type of assay are either enzymes, fluorophores or radionuclide containing molecules (i.e. radioisotopes) and chemiluminescent molecules. In the case of an enzyme immunoassay, an enzyme is conjugated to the second antibody, generally by means of glutaraldehyde or periodate. As will be readily recognized, however, a wide variety of different conjugation techniques exist, which are readily available to the skilled artisan. Commonly used enzymes include horseradish peroxidase, glucose oxidase, β-galactosidase and alkaline phosphatase, amongst others. The substrates to be used with the specific enzymes are generally chosen for the production, upon hydrolysis by the corresponding enzyme, of a detectable colour change. Examples of suitable enzymes include alkaline phosphatase and peroxidase. It is also possible to employ fluorogenic substrates, which yield a fluorescent product rather than the chromogenic substrates noted above. In all cases, the enzyme-labelled antibody is added to the first antibody hapten complex, allowed to bind, and then the excess reagent is washed away. A solution containing the appropriate substrate is then added to the complex of antibody-antigen-antibody. The substrate will react with the enzyme linked to the second antibody, giving a qualitative visual signal, which may be further quantitated, usually spectrophotometrically, to give an indication of the amount of hapten which was present in the sample. “Reporter molecule” also extends to use of cell agglutination or inhibition of agglutination such as red blood cells on latex beads, and the like.

[0114] Alternately, fluorescent compounds, such as fluorescein and rhodamine, may be chemically coupled to antibodies without altering their binding capacity. When activated by illumination with light of a particular wavelength, the fluorochrome-labelled antibody adsorbs the light energy, inducing a state of excitability in the molecule, followed by emission of the light at a characteristic colour visually detectable with a light microscope. As in the EIA, the fluorescent labelled antibody is allowed to bind to the first antibody-hapten complex. After washing off the unbound reagent, the remaining tertiary complex is then exposed to the light of the appropriate wavelength the fluorescence observed indicates the presence of the molecule of interest. Immunofluorescence and EIA techniques are both very well established in the art and are particularly preferred for the present method. However, other reporter molecules, such as radioisotope, chemiluminescent or bioluminescent molecules, may also be employed.

[0115] Synthetic forms of proteinaceous markers are also contemplated.

[0116] The present invention extends to a composition for the prophylaxis and/or treatment of a behavioral disorder such as ADHD comprising one or more of the present molecular markers. Gene or protein replacement compositions are especially contemplated.

[0117] Accordingly, yet another aspect of the invention pertains to a composition for the treatment and/or prophylaxis of a behavioral phenotype such as but not limited to ADHD, said composition containing a nucleic acid molecule comprising a sequence of nucleotides which hybridizes under conditions of low stringency to a sequence of nucleotides comprising or contained within SEQ ID NO:1 or SEQ IDN NO:2 or SEQ ID NO:3 or a complementary or derivative form thereof and one or more acceptable carriers and/or excipients.

[0118] A further aspect of the invention pertains to a composition for the treatment and/or prophylaxis of a behavioral phenotype such as but not limited to ADHD, said composition containing a polypeptide or protein or peptide comprising a contiguous sequence of amino acids as set forth in SEQ ID NO:21 or SEQ ID NO:22 or an amino acid sequence having at least 70% similarity thereto or a derivative thereof and one or more acceptable carriers and/or excipients.

[0119] The present invention provides, therefore, both gene-replacement and protein-replacement therapy in the treatment of a behavioral disorder. The protein-replacement therapy may involve providing gene products of DOCK 3 and/or NHE and optionally of gene products of the associated genes KIAA0800, HUMAGCGB and/or ARP. Alternatively, or in addition, the protein-replacement therapy may involve other members of a metabolic, physiological and/or neurological pathway but which DOCK 3, NHE, KIAA0800, HUMAGCGB and/or ARP are associated.

[0120] Another aspect of the present invention contemplates an isolated nucleic acid construct or vector including an expression vector or cell line comprising genetic forms of the subject molecular markers.

[0121] Yet one further aspect of the present invention extends to the use of a nucleic acid molecule comprising a sequence of nucleotides which hybridizes under conditions of low stringency to a sequence of nucleotides comprising or contained within SEQ ID NO:1 or SEQ ID NO:2, SEQ ID NO:3, SEQ ID NO:20 and/or SEQ ID NO:21 or SEQ ID NO:4 or SEQ ID NO:5 or SEQ ID NO:12 or SEQ ID NO:14 or a complementary or derivative from thereof or having at least 60% similarity thereto in the detection of a mutant genotype wherein the presence of said mutant genotype is indicative of a behavioral disorder or the likelihood that a subject may develop a behavioral disorder.

[0122] A further aspect of the present invention is directed to the use of a nucleic acid molecule in the manufacture of a medicament suitable for the treatment of a behavioral disorder wherein said nucleic acid molecule comprises a sequence of nucleotides which hybridizes under conditions of low stringency to a sequence of nucleotides comprising or contained within SEQ ID NO:1 or SEQ ID NO:2, SEQ ID NO:3, SEQ ID NO:20 and/or SEQ ID NO:21 or SEQ ID NO:4 or SEQ ID NO:5 or SEQ ID NO:12 or SEQ ID NO:14 or a complementary or derivative from thereof or having at least 60% similarity thereto.

[0123] Yet another related aspect of the invention contemplates a genetically modified animal model of a behavioral phenotype such as but not limited to ADHD. Preferably, the animal model is a mouse. Preferably the mouse is modified by the inclusion and/or exclusion of more of the present molecular markers.

[0124] A still yet further aspect of the present invention contemplates the use of a genetically modified animal model of a behavioral phenotype such as but not limited to ADHD for screening for modifying mutations which affect said behavioral phenotype.

[0125] Still another aspect of the present invention provides an isolated molecular marker for diagnosing a behavioral phenotype such as but not limited to ADHD.

[0126] Even yet another aspect of this invention contemplates a method for diagnosing a behavioral phenotype or assessing the likelihood that a subject may develop a behavioral phenotype such as but not limited to ADHD, said method comprising contacting a sample derived from said subject with a probe capable of detecting any aberrations in DOCK 3 and/or NHE or in any of SEQ ID NO:1 or SEQ ID NO:2, SEQ ID NO:3, SEQ ID NO:4 to SEQ ID NO:8 or SEQ ID NO:12 or SEQ ID NO:14 or derivatives thereof under conditions suitable for selective binding to occur wherein the absence of binding is indicative of a disrupted genetic region.

[0127] A further aspect of the present invention contemplates a method for diagnosing a behavioral phenotype or assessing the likelihood that a subject may develop a behavioral phenotype such as but not limited to ADHD is contemplated wherein said method comprises contacting a biological sample of a subject a ligand such as antibody to a proteinaceous form of the subject molecule marker wherein the absence of the molecular marker is indicative of a potential for development or presence of a behavioral disorder with a proteinaceous form of a molecular marker according to the present invention or antibodies thereto under conditions suitable for selective binding to occur.

[0128] Another aspect of the present invention is directed to a method for screening a compound for an ability to ameliorate one or more symptoms of a behavioral phenotype in a human subject comprising administering one or more of said compounds to a genetically modified animal model of said behavioral phenotype and assessing the animal for changes consistent with the amelioration of one or more symptoms of said disorder.

[0129] The present invention is further described by the following non-limiting Examples.

### EXAMPLE 1

### Physical Mapping of the Mutation

[0130] At the p arm a phage library in the lambda ZAP Express vector (Stratagene, La Jolla, Calif.) was constructed from one of the YAC clones that spanned the p arm breakpoint. EST and STS markers in the vicinity of the breakpoint were used as probes to screen this library by hybridization. This screen initially yielded two clones positive for EST markers in the area of interest. Sequence analysis of these and another three clones isolated on subsequent screens of the lambda library revealed the presence of four closely mapping genes, ARP, HUMAGCGB, KIAA0800 and KIAA0299. Three overlapping human BAC clones containing these genes were found via the high throughput genome sequence database at the National Centre for Biotechnology Information (NCBI, Bethesda, Md.; http://www.ncbi.nlm.nih.gov/). The BAC clones were analyzed by fluorescence in situ hybridization (FISH) with one localizing within the breakpoint and two clones crossing the p arm breakpoint (FIG. 3).

### EXAMPLE 2

### Fine Mapping the p arm Breakpoint

[0131] Southern blots of genomic DNA digests from an affected family member and male and female control subjects were probed with PCR products generated from unique genomic sequence in the introns of the KIAA0299 gene at the telomeric ends of the breakpoint-spanning BAC clones. A probe located 5′ and encompassing exon “7” yielded fragments of altered size in the patient compared to the control DNA (FIGS. 4 and 5). From the banding pattern seen on Southern analysis, a model of the breakpoint could be postulated. This was later confirmed by sequencing.

### EXAMPLE 3

### Identification of Unknown 3q Breakpoint Sequences

[0132] The known genomic sequence around the 3p breakpoint were used in inverse PCR experiments to identify the unknown sequences of q arm origin. Oligomers were designed that primed outwards from either side of “exon 7” (see FIG. 6). The genomic DNA from the patient and the two control individuals was digested with HindIII to excise a fragment surrounding the primers. This fragment was then re-circularized. The circular template was then used in long-range PCR experiments to amplify the mutant fragment. In the case of a HindIII digest, an approximately 10 kb band was expected from the normal chromosome and the inverted chromosome was expected to yield a 4 kb fusion fragment (see FIG. 5). The resulting 4 kb mutant fragment was excised from an agarose gel, purified and sequenced using big dye chemistry with primers from several sites within the known 3p sequence.

[0133] A BAC and PAC clone contig was assembled across the critical region of 3q using both laboratory-based chromosome walking and in silico methods (FIG. 7). By analyzing the resultant sequences using the BLAST programme at NCBI, it was found that the 3q breakpoint sequence originated from the overlap between BAC clones RP11-89n15 and RP11-56b20. Analysis of the overlapping sequence by database searching revealed a small expressed sequence tag site (EST) with homology to a sodium/hydrogen ion-exchanger family. This gene, termed NHE, appears to have ubiquitous expression throughout human tissues. Its function is as yet uncharacterized.

### EXAMPLE 4

### Assessment Procedure

[0134] Behavior Rating Scales

[0135] Behavior rating scales are valuable instruments, capable of providing a great deal of data quickly and efficiently (Conners et al., Psychopharmacology Bulletin 21: 809-843, 1985; Barkley et al., J. Child Psychol. Psychiat 18: 137-165, 1977). The rater (or informant) is asked whether a range of specified maladaptive behaviors are present in the child. Normative data allow comparison with a reference population so that the severity of a child's symptomatology can be meaningfully quantified.

[0136] Several standardized behavior rating scales were posted to the families for completion before the clinical assessment. These included the DSM-IV ADHD Parent and Teacher Rating Scales, Conners' Parent Rating Scale and Achenbach Child Behavior Checklist discussed below.

[0137] 1. DSM-IVADHD Parent and Teacher Rating Scales (DuPaul and Barkley, ADHD Rating Scale, 1995)

[0138] This rating scale consists of the 18 items in The American Psychiatric Association's Diagnostic and Statistical Manual of Mental Disorders, 4th edition (DSM-IV) diagnostic criteria for ADHD (see appendix), listed such that the Inattention items alternate with the Hyperactive/Impulsive items. The respondent is required to mark each item on a four-point scale: “never or rarely” (0), “sometimes” (1), “often” (2) or “very often” (3). The scores are then dichotomized, such that 0's and 1's equate with the absence of the behavior, and 2's and 3's indicate its presence. This scale enables greater precision than simply rating each item as present or absent (as the criteria specify).

[0139] The DSM-IV ADHD Parent and Teacher Rating Scales was used in the present study to determine whether subjects met DSM-IV diagnostic criteria for ADHD and to classify subjects into types (Predominantly-Inattentive, Predominantly-Hyperactive/Impulsive, or Combined).

[0140] 2. Conners' Parent Rating Scale—Revised, Conners' Teacher Rating Scale—Revised

[0141] (Goyette et al., J. Abnormal Child Psychology 6: 221-236,1978; Conners et al., 1985, supra)

[0142] The Conners' rating scales have been the most frequently used behavior rating scales in ADHD research (Barkley et al., 1977, supra). The revised 48-item version of the Conners' Parent Rating Scale—revised (CPRS—R) yields five factors—Conduct Problems, Learning Problems, Psychosomatic, Impulsive-Hyperactive, and Anxiety. In addition a Hyperactivity Index has been derived from the ten items with the highest loading from the factor scales. Each item is rated on a four point scale—not at all=0, just a little=1, pretty much=2, very much=3. The informant is asked to rate the items according to observed behavior over the preceding month. Scores for each factor are obtained by summing the scores on all items contained within the scale, and dividing by the number of items in the scale. Normative data have been published for the CPRS—R by age and sex categories for children from 3 to 17 years (Goyette et al., 1978, supra; Conners et al., 1985, supra). Raw scores for each factor are transformed by age and sex into T scores, with a mean of 50 and a standard deviation of 10.

[0143] The Conners' Teacher Rating Scale—revised (CTRS—R) complements the CPRS—R and scoring is identical. The revised 28-item version has three factors—Conduct Problem, Hyperactivity, and Inattentive-Passive. A Hyperactivity Index has again been derived from the ten highest loading items.

[0144] The CPRS—R and CTRS—R were used in this study to complement and expand on the DSM-IV ADHD Parent and Teacher Rating Scale data.

[0145] 3. Achenbach Child Behavior Checklist, Teacher's Report Form

[0146] The Child Behavior Checklist (CBCL) (Achenbach, Manual for the Child Behavior Checklist/4-18 and 1991, Profile, 1991) and complimentary Teacher's Report Form (TRF) (Achenbach, Manual for the Teacher's Report Form and 1991, Profile, 1991) are broad band standardized behavior rating scales which are widely used in pediatric and child psychiatry clinical research and practice in many countries. These 113-item checklists provide a multidimensional profile of empirically derived problem behavior syndromes.

[0147] Each symptom is rated on a 3-point scale (0=not true, 1=somewhat or sometimes true, 2=very true or often true). The informant is asked to rate the items according to observed behavior over the preceding six months. The items are grouped into eight separate narrow band syndrome scales: Withdrawn, Somatic Complaints, Anxious/Depressed, Social Problems, Thought Problems, Attention Problems, Delinquent Behavior and Aggressive Behavior. These subscales are grouped into two broad-band factors or global dimensions—Internalizing (Withdrawn, Somatic Complaints, Anxious/Depressed) and Externalising (Aggressive, Delinquent Behaviors). In addition a Total Problems score is computed. Norms are provided in the form of T scores by age and sex category. T scores were derived using the CBCL publisher's computerized scoring program.

[0148] In addition to these rating scales, results of formal psychometric testing were sought where these had been conducted.

### EXAMPLE 5

### Clinical Assessment

[0149] All subjects then underwent a clinical evaluation. This consisted of a semi-structured interview (pregnancy/perinatal period, early development, temperament/behavior, learning, general health) and a neurodevelopmental assessment.

### EXAMPLE 6

### Northern Blot Analysis of Expression of DOCK 3 and NHE

[0150] Northern blot analysis of a panel of human adult tissues confirmed that the expression of DOCK 3 is restricted to the brain. Specifically the gene is expressed in the cerebellum, cerebral cortex, medulla, occipital pole, frontal lobe, temporal lobe and putamen (FIG. 15). There was no expression in the spinal cord or in heart, skeletal muscle, colon, thymus, spleen, kidney, liver, small intestine, placenta, lung and peripheral blood leukocyte (FIG. 16). Evidence from the HUGE database (http://www.kazusa.or.jp/huge/index.html) suggests that this gene is also expressed in the testis. The NHE gene is more widely expressed. Specifically the gene is expressed in the cerebellum, cerebral cortex, medulla, occipital pole, frontal lobe, temporal lobe, putamen and spinal cord (FIG. 15) as well as the heart, skeletal muscle, thymus, spleen, kidney, liver, small intestine, placenta, lung and peripheral blood leukocyte (FIG. 16). The gene is not expressed in the colon. The NHE probe hybridized to a larger, 7.5 kb band in skeletal muscle.

[0151] Those skilled in the art will appreciate that the invention described herein is susceptible to variations and modifications other than those specifically described. It is to be understood that the invention includes all such variations and modifications. The invention also includes all of the steps, features, compositions and compounds referred to or indicated in this specification, individually or collectively, and any and all combinations of any two or more of said steps or features.

We claim:

1. A method of diagnosing a behavioral disorder in a subject comprising
obtaining a sample from said subject; and
analyzing said sample for the presence of a molecular marker of the behavioral disorder,
wherein said molecular marker comprises a genetic location on chromosome 3 or an equivalent location on another chromosome,
wherein a mutation at said location alone or in combination with environmental or other genetic factors is associated with, facilitates the development of, or facilitates the progression of said behavioral disorder.

2. The method of claim 1, wherein the behavioral disorder is Attention Deficit Hyperactivity Disorder (ADHD).

3. The method of claim 2, wherein the absence of the mutation is indicative of a low risk of developing ADHD.

4. The method of claim 2, wherein the genetic location of the molecular marker is associated with the DOCK 3 and/or NHE gene.

5. The method of claim 1 or 2, wherein the other genetic factors include a mutation in one or more of the HUMAGCGB, KIAA0800 and/or ARP gene.

6. The method of claim 1, wherein the mutation is selected from the group consisting of a nucleotide substitution, a deletion, an addition and an inversion.

7. The method of claim 6, wherein the mutation is a chromosome 3 inversion.

8. The method of claim 7, wherein chromosome 3 comprises p-arm and q-arm breakpoints and the inversion is between the p-arm and q-arm breakpoints.

9. The method of claim 8, wherein the inversion breakpoints are between band p21.3 and band q21.

10. The method of claim 9, wherein the molecular marker comprises a nucleotide sequence selected from the group consisting of SEQ ID NO:1, SEQ ID NO:2, a nucleotide sequence having at least about 60% similarity to SEQ ID NO:1 or SEQ ID NO:2, a nucleotide sequence capable of hybridizing to SEQ ID NO:1 and/or SEQ ID NO:2 under low stringency conditions, and complementary forms of a nucleotide sequence capable of hybridizing to SEQ ID NO:1 and/or SEQ ID NO:2 under low stringency conditions.

11. The method of claim 9, the molecular marker comprises a nucleotide sequence selected from the group consisting of SEQ ID NO:3, a nucleotide sequence having at least about 60% similarity to SEQ ID NO:3, a nucleotide sequence capable of hybridizing to SEQ ID NO:3 under low stringency conditions, and complementary forms of a nucleotide sequence capable of hybridizing to SEQ ID NO:3 under low stringency conditions.

12. The method of claim 3, wherein the molecular marker comprises a nucleotide sequence selected from the group consisting of SEQ ID NO:12, SEQ ID NO:14, a nucleotide sequence having at least about 60% similarity to SEQ ID NO:12 or SEQ ID NO:14, a nucleotide sequence capable of hybridizing to SEQ ID NO:12 and/or SEQ ID NO:14 under low stringency conditions, and complementary forms of nucleotide sequence capable of hybridizing to SEQ ID NO:12 and/or SEQ ID NO:14 under low stringency conditions, wherein the presence of said molecular marker is indicative of a low risk of developing ADHD.

13. The method of claim 2, wherein said molecular marker comprises a nucleotide sequence selected from the group consisting of SEQ ID NO:13, SEQ ID NO:15, a nucleotide sequence having at least about 60% similarity to SEQ ID NO:13 or SEQ ID NO:15, a nucleotide sequence capable of hybridizing to SEQ ID NO:13 or SEQ ID NO:15 under low stringency conditions, and complementary forms of a nucleotide sequence capable of hybridizing to SEQ ID NO:13 or SEQ ID NO:15 under low stringency conditions.

14. A method of diagnosing a behavioral disorder in a subject comprising
obtaining a sample from said subject; and
analyzing said sample for the presence of a molecular marker of the behavioral disorder,
wherein said molecular marker comprises a nucleotide sequence or a modified form thereof, whose amino acid sequence is selected from the group consisting of SEQ ID NO:21, SEQ ID NO:23, an amino acid sequence having at least about 60% similarity to SEQ ID NO:21 or SEQ ID NO:23,
wherein the presence of a modified form of said molecular marker is indicative of a behavioral disorder or the likelihood that a subject may develop a behavioral disorder.

15. The method of claim 14, wherein the molecular marker further comprises a nucleotide sequence or a modified form thereof, whose amino acid sequence is selected from the group consisting of SEQ ID NO:16, SEQ ID NO:17, SEQ ID NO:18, and an amino acid sequence having at least about 60% similarity to SEQ ID NO:16, SEQ ID NO:17 or SEQ ID NO:18.

16. The method of claim 14, wherein the amino acid sequence is SEQ ID NO:21.

17. The method of claim 14, wherein the amino acid sequence is SEQ ID NO:23.

18. The method of claim 14, wherein the modified form produces an absence of the gene product, an amino acid substitution in the gene product, an amino acid addition in the gene product, or amino acid deletion in the gene product.

19. The method of claim 14, wherein the behavioral disorder is ADHD.

20. An isolated nucleic acid molecule comprising a nucleic acid sequence selected from the group consisting of SEQ ID NOs:1 to 20, SEQ ID NO:22, a nucleotide sequence having at least about 60% similarity to SEQ ID NOs:1 to 20 or SEQ ID NO:22, a nucleotide sequence capable of hybridizing to SEQ ID NOs:1 to 22 or SEQ ID NO:22 under low stringency conditions, and complementary forms of a nucleotide sequence capable of hybridizing to SEQ ID NOs:1 to 22 or SEQ ID NO:22 under low stringency conditions.

21. An isolated protein comprising an amino acid sequence selected from the group consisting of SEQ ID NO:21, SEQ ID NO:23, SEQ ID NO:16, SEQ ID NO:17, SEQ ID NO:18, and an amino acid sequence having at least about 60% similarity to SEQ ID NO:21, SEQ ID NO:23, SEQ ID NO:16, SEQ ID NO:17, SEQ ID NO:18.

22. An isolated antibody to the isolated protein of claim 21.

23. The isolated antibody of claim 22, wherein the antibody is a monoclonal antibody.

24. A method for determining the likelihood of a subject having a behavioral disorder comprising
obtaining a sample from said subject;
determining the presence of a mutation in a nucleotide sequence on chromosome 3 in said sample, wherein the nucleotide sequence is selected from the group consisting of SEQ ID NO:1, SEQ ID NO:2, SEQ ID NO:3, SEQ ID NO:4 and SEQ ID NO:14.

25. The method of claim 24, wherein the nucleotide sequence comprises more than one member of the group.

26. The method of claim 24, wherein the behavioral disorder is ADHD.

27. The method of claim 26, wherein a mutated nucleotide sequence is selected from SEQ ID NO:13 and/or SEQ ID NO:15.

28. A kit for diagnosing a behavioral disorder, said kit in compartmental form comprising a genetic probe capable of detecting the presence of or a mutation in any one of SEQ ID NOs:1 to 20 and/or SEQ ID NO:22.

The application's sequence listing, which the Patent Office published only in electronic form, follows.

SEQUENCE LISTING (23 sequences)

SEQ ID NO: 1 - DNA, 4203 bp, human
  misc_feature (3997)..(4203): n = any nucleotide
ccacacaagggagtgaccttacaggatcaaataacagctttaaggttgtcccctggagggcctgcgtagctcagccccacttgttaaatacccacctggagagttttgtaagaatgtggcctcattcccatagaatacttccatggtggccaccggggaggggtctatcttcttggaacagttagctctttcgttatgttcttggacacccctgctacccctaaaaaaaagtgtacctggctattgagaaattctatcattcacagaacagacatttttctgggcgggagtgggcagctatgattagtgagaggaggagcctaaaggtccgaaggtgggaaggggtggccataacccaggggagcacagtcaggcctgggaggagttaccaatcatgacactttgaacgaagaatcaacaagatctgttgattgcaagatattcttctattagtctggcttcccatgcaacaactatacaacaggtgctgggttggtggtgagggtttagaaagttgattttagcctggagcttgccttctgggagctgacagtcttataagggaaataagacaaaccgaacatagctccaattccagacaaagaaggaaaggagactatgggtcagggcaggcttcctggaggtgaggggctgagctgggctttgaagagtggtggtgtctgagagtgctagtgaaggatgacaccagggttttgacttagtagtgctagtgacagagatgggcaaatctgctgggattagagcatgtggtccaaatgtaggtggaaaggagaagtcctgcagttcctgttctttggtaagtggttgacttgggggtcacaaggtgacatttacaggcatcagaatgaatggattcttagggaggagagagaggaggaaagtttccggtaggagccagttcttagggctccaagggaggcagacacccaggagcagcagatgccgtgtcctgggtaggaacacgaagggcccaatgaagctcttccttactagcaaggcggctgttgattgttctggccccaaacattcaccactcaggccatctcagagaagcaagaacccaggaggtgtcagcggcctcagcccacaggggatccaggagagaggggcacgagtgcaccccacctggttccctcgtggcgactccatcctgcgggccctgggaatgcacagggtggctccggggacctttccgacagcactgtgggtgacactgggatgggtctgaaaatggtgtcgtgtcctccttttctggatctcccctctccgaccaggaggcctgtggccatctcggggcgcaggcaggaggcactggaagcggaagcgagtggggagtccgggtagagggagtcgcccacctgaccggcttcgccccctccggggtttgctgcagctgagggccccggaccagcgattctagaagccggtccggggccgggcagtccaatagcttctcgcggatttccctccgctggcgcgcagcagcggcgcgtggattcgcgcgcgggctcgggacggcgcgagcccgggcagcgcgagcccctgcgcggcagggagtggcgcatgcgcgggcgtcctgcgagcccgctggggcgagccgagccgcggcggcgccgggagccgggcggcggagctgtgaagaagcaagcggcggcacgggagcagcggcgacggacaggtggcgagccttcgcccgcgccgccaggggctgctgggccacccgcggagcctcgcggtccagacgtggcgggggtggcggcggcatcccggacggcctgtgaggaatgcgccgccccactggcccgcgccgcctgaccgtccccgcctcgactcgcggtgcgccacagccgggcccgcggccgtccccgccgcgttgtcgcccggtcgccgcgcccgcggggccgcgcccggcacggccatgtggacccccacggaggaggagaaatacggcgtaggtaggtgaggctcaggcctggccgtggcgggggttctgggggacgcgcccagctcccggccccgcctggattcgcatcctcgtgcccccgccactgcccgcaggctgcgcggcctcggcgcggggcgagcgcggggtgggggcaggtgcgggtgcgggtgcgggtgcgggggtgggcgcgggtctctgtgcagagagggcggcagggggcgctggcggtgcggccttggcaggtgcggcccgcgggaggggtgggcaaggcccgggcagttgcccgaggtttctggtgtgggccacggggcaattttacccgataaaccaaattctgggaatatgttttctcccctccaaaagctcgattttaatgagtttccgcacctgaattgatgagcccgatggctgtttatttttgatctggaaccttacaagaaaacggatgaaaaacgttgacatcattttcccagttcaaaaatttggacatttgactgcaaatgtttgatctgttttaatttgttttgcctttagtattagaaataataccttacgatgggaaatgtttttggacatgtatcaatgtttatacggttttttttttaaaccctgttttcagatgagaccttattcctcttagaaacctttttttaatgttgtaagtgttaaactccagaagctaaataattcttacaatattcaacttctttaaaaagaatattcagtaatttaaagtattgaatgttttacaatgttagtgttttgtggcaattacatgatagagttaagcctcattgcatcacctatcatcttgttcagttagaaacagatttaaaatgttgagtgtacaggttttgtttttcctaagctcgtaatggaaaattttagataggaaacctgtctaaacatagatttttgtttcccatctttaccgcaatttaatcaagatttagttcacaattcactacaaaataacttgaaactgcagtggtaacgaatgttttggaatgctatcaggcaggttatcgtgtgaaaattgaatttatttaaattcgaggaccagcagagaggtcttctattctggtagaagatcttgttttaaaaggtaactttctgaaacaattaggtatgttaggatggaggtgataaagggagctctggtcctagagtctctattgagaaggaattgagaaatgatgcgaagagctgggattcacctctagggacattttaccccttctcttagagtattccctgaatactgagttgattctgtgaagtgaggagttggtggtttatcttctccataactcgctcccagaactgctgaactagaataacaaataattgatgtgagtggtcaactctccagtggcaccccatgattgatttttttggaggggggaggagccctattttggcgggggtgggcgcgtggggggaggagcccttgaatagtggacaaagtggaattcagagtcctagcttctctttactggtggtgtgggcaagtaatttaacatcatttaacgtcattttattaatgtataaattggggataatgtttacctatcttacaggattgtgaaagtgaaatgagaacgtgctgaatgcttaatagtttcttcttttcccttagtatttagactaataacactaagtgtgttctgagacagagccagtgcaaggtaatcaagataggtacatgtgaatctcaaagcactaggatttggtgtgtgattttcccagcaagatgcaacgaaattcttgcattcctaggattgtgtttttagctttagaaaaattgttattccctttggagggccacagcattgggctcagggcagagcttaatgcttgctaaatgagagagacagttacactgaagacattttcatagcagctgtggtttagcataacttagatgccttttctaccaaaccaagcaactctctatttatctcacagtcttccactgtcccttccttagttatgatctaaaagtttttgtgtaaattgtttaaaactcannnnnnnnnnnnnnnnnnnnnnnnnnnnnnnnnnnnnnnnnnnnnnnnnnnnnnnnnnnnnnnnnnnnnnnnnnnnnnnnnnnnnnnnnnnnnnnnnnnnnnnnnnnnnnnnnnnnnnnnnnnnnnnnnnnnnnnnnnnnnnnnnnnnnnnnnnnnnnnnnnnnnnnnnnnnnnnnnnnnnnnnnnnnnnnnnnnnnnnnnnnnnnn

SEQ ID NO: 2 - DNA, 483728 bp, human
  misc_feature (19734)..(19962): n = any nucleotide
  misc_feature (69768)..(69974): n = any nucleotide
  misc_feature (94975)..(95181): n = any nucleotide
  misc_feature (127559)..(130531): n = any nucleotide
  misc_feature (142395)..(143725): n = any nucleotide
  misc_feature (152195)..(154039): n = any nucleotide
  misc_feature (167914)..(168120): n = any nucleotide
  misc_feature (170745)..(173326): n = any nucleotide
  misc_feature (179281)..(182018): n = any nucleotide
  misc_feature (208000)..(209952): n = any nucleotide
  misc_feature (224704)..(224953): n = any nucleotide
  misc_feature (231493)..(233474): n = any nucleotide
  misc_feature (239274)..(247177): n = any nucleotide
  misc_feature (262462)..(263424): n = any nucleotide
  misc_feature (283171)..(283390): n = any nucleotide
  misc_feature (285365)..(288406): n = any nucleotide
tactactatgctgtccaactgtccagtgctagaacttatttcttccgtctagctatatgtttgtacccattgaccaactgcccctttgttcctccctaccttttccagcctttggtaaccatcattctactctctacatccatgagatccatttttttttaaaagctcccacatatgggtgagaacatgtaatatttgtcttctgttcctgacttagttcacttcacataatgacctctagttccaattgtgttgctgcaaatggcaggatttcattatttttttatggttgaatagtattctattgtgtgtacataccacattatctttatccatatccattggcagacacttaggttgattccgtatcttggctattgtgaatagtgctgtgataaacatgagagtgccagcatccctttgatatatactgatttcctttcttttggatagatactcggtagtgagattgctagaccatatggaagttctgtttttagttctatatagtatagtatagtagtctctatactgttttccataatggccatactaatttagattcctaccaactgtgtataagagttcccttttctctgcatctttgccagcatttgttattttttgtctttttgataatagccattctaactggggtgagataatagctagtggttttgatttgcatttccctgatggttagtgatgttgagcattttttcatacgccaactggccatttgtatgttttctttggagaatgtctatacagatcctttgtggcccttgttttttttttttttttttttttaagacaggttctcactttgtcacccaggctggagtgccgtggcaggatcatggctcactgcagcctcgaattcctgggctcaagccattctcttgagtagctaggacaacaggtccacgccaccacacccagctaatttttaaattttttgtagagactgggtcttgctctgttgctcaggttggtcttgaacctgtggcctcaagtgatcttcccgccttggcctcccaaagtgatgggattacaggcatgagcttgctgttgcccagcttgctgcctactttttaatgggattatttggttttgctgttgagttccttgtatattctgtatatcagataaatagtttgcaaatattttctcccattctgtgtgttgtctctttactctgtttattgttttctttgctgtgcagaagcttttaatttaatgtagccccatttgtctatttttgtttttgttgcctgtgcttttgaggtcttagtcataaaatctttgtgtagaccaatgttttcttttagtagttttgtagttttgggtcttatgtttacctccttaatccattttgagttgatttttgcgtatggtgagagacaggtgtctagtttcattcttctacatattgatacccagttttctcagcaccatttatggaagaaagtgtcctatccccagtgtatatttttggcacctttgttgaaaatcagttggctgtaaataggtggatttatttctggttttctctgttctgttccagtggtttatgtgtctgtttttaatgccagtaccatgttgctttggttactgtagctttgtagtatattttgaagtccgatattgtgatgcctctagctttgttctttttgtacaagattactttggctattcacagtcttttgtggttcatacaaattttagattgtttattctatttctgtgaagaatataattggtactttaatgaggattgcattgaatctgtagatttctttgggtagtatggtcattttaacactgttagttctttggatccatgagcatgggatttctttccgtttctttgtgtcctcttcaaatctcccttcagtgttttgtcatttttgtcatagaggtctttcatctctttgattaaatttattcctaggtgttttatttttctgtatgtgttttagctggttcattagtggcatatagaaatgctactgattttttctttttttttgagatagagtcttgctctgtcacccaggctggagtgcagtggcgcaatctcggcacactgcaacctccgcctgctgagttcaagcgattctcctgcctcagcctcccgagtagcttggattataggtgtacatcaccacacccagctaatttttttttggtatttttagtagagatggggtttcaccatgttggtcaggctggtctcgatctcctgacctcaagctgtctgcctgtcttgtcctcccaaatggctgggattacagatgtgagccactgtgcccagtctgattgttgtatgttcgttttgtatcctgtaactttgccaaatgcatttatctgttctaagacttttttttttttcctgtagtttccagctttttctgtgtataagatcatactgttttcagatgagggacagtttgacttcctttttctcagtttgaatgccttttatttctcttgcctgattgctctagctaggatctccagtactgtgttgaataagagtagtgaaagtgggcatccttgtcttggtccagattttaaggaaaagctttcaacttttccccattccgtatggtgtcagctgtgggtttgtcataggtggcttttattatgttgagttttattccttctatgcctgatttgttgagagtttctatcatgaaggatgccgaattttattgagtgtttttttctgcatccattgatttgatcatatgctttttattcttcattttgtcgatgtgatatatcacatttattgacttgcatatgttgaacaatccttgcaatccctgttatagatcccacttgatcatggtgtgttatctttttgatgtgttattatatttggtttgcaagtattttgttgaggatttttgcatctatgtttatcaaggatgttggcctgtagttttctcttttttttcttgtgtctttgtatggttttagtatcagagtattgcttgccctgttgaatgaattgggaagaattcagtttttggaatagtttgagaagaactggtgttagttcctcttcataagtttggtagaatttagcagtaaagccattggtcctttttctttttgggagactttttattattgattcaatgtcattacttactattggtctgttcaggttttgtttttttcttggttcagtcttggtgggttttatgtgtcgaagaatttagatattttcgttagggtttcaatttgttagcatatagttgttcataagagtctaatgattcttttatgtatctgtggtatcagttgtgatgtcttctgtttatgaacttatttgggttttctcggttactgtagttagctgtttattgattttgtttatctttttaagaaaacaagttttcatttgttgattctttgtatattttggtctcttgcatttagtcctgctctgatatttattgtttttttcatctgtaatttttttattcttttctagttccttggaggtacattggtaggttaacttctacttttttaatataggtgtttatttctataaactttttccttagctttgctttttccatatcccatagatttaggtattttatttttccattttcatttgtctcagggaagtttttgattttcttcctaatttctttattgacccagtgatcattcaggaacatgttgtttaattttcatttatttgtacagtttccaaaattcctctagttactaatttctgatttgttttattgtggtctgagaagatacttgatatcattttgatttttaagaatatgttgaggctttatggcctaacgtatggtctatcctgggaaaacttttatgtgctgatgtgaagaatgtgtattctgcagcagttggataaaatattctgtaaatatctgttaggtccatttgttctatagtgcaggttaagtctgatgtttctttgtttattttctctctaggtggtctgtccagtgctaaaagtgggtgttaaattccccagctattattgtattggtatctctctttttagttctattatttgctttatgtttttctgggtattccagtgttggatgcattttatttatggttgttatagtctcattatataagtataaagtaaccatataatgactttgttactataattactccagtatgcgtggaaacatgttttttccatctcttcactttcagtctatgtgcgtctttataggtgaagtgcatttcttgtaggcagcatttttttttttttttttttgagacggagtctcactctgtcacccaggctggagtgcagtggctcaatctcggatcactgaaacctccccttcctgggttcaggctattctcctgcttcagcctcctgagtaactgggattacaggcatgtgccatgacgctcagctaattttttatgtatttttagtagagacagggttttgtcatgttggccaggctggtctcgaactcctgacatcaagcgatccatctgccttggcctcccaaagcgctgggattacagatgtgagtcaccacgcccggcctctatatcttttaattggagaatttaaactgtttacattcaaggttgtcactgatagttgaggacttattcctctccatttgctacttgctacttgttttctgattttttttttttttttttaatctattccttgttcctttcttcttctcctattgttggcctttacaatttgatggttttctgtagtggtaacgtttgactctttttcttttttgtgtactactgttctcactgttctaccagtgagtttcatactttcatgtgttttcatgatggtatgtatcaccttttgctttgagatgttgatatggtttagctctgtgtccccacccaaatctcatcttgaactgtaatccccacgtgttgagggagggacctgtaatccccatgtgttgagggagggaggtgattggatcctggggcagttccccctgtgctgttcccttgatagtgagtgaattcttatgagatctgctggtttttttcatttttatttttattttttgagacagagtctcactctgttgcccaggctggagtgcagtggcgtgatcttggctcactgcaacctccgcctgctgggttcaagcagttctcctgcctcagcctcccaagtagctgagactacaggcacgcaccaccatggccagctaattttttgtatttttagtagagatggggtttcaccatgctggccaggctggtgttgatctcctgacctcttgatctgcctacctcagcctcccaaaatgctgggattacaggcatgagctaccctgcccacccgagatctgatggttttgaaagtagcagttttctggctgagcatggtggctcacacctgtaatcccagcactttagcaggctgaggcaggtggatcacttgaggccaggagtttaagaccagcctggccaacatggtgacacctcatcttcactaaaaaatacaaacattagctgggtgtgttagtgcacacttgtaatccgagctactcaggaggctgaggcatgagacttgcttgaacctgggaggcagaggttgcagtaagccaagatcgtaccactgcactccaacctgagcgacagagtgagactctgtctcaaaaaaaaaaaaagtggcagttttctcctgtacgctcacttctccctcctgccaccttatgaagaaggcgcctgcttctcctttgccttctgccatgattgtgtttcctgaggcctccccatccatatggaattgtgagtcaattaaaccctttcctttataaactacccgatctcagggaagttctttatagcagtgtgaaaaaggactaatacagatgtgggactcccttatgcatttctttagggccagtatagtcgttaatgaattgtctcagtttttgcttgtctgggaaagacttttatttctattttgaaggatagctttgctgaatatagtattgttgcctagcaggttttttctttcagtactttgaatatatcattctattctctccaggcctgtgacgtttttgctgaggaagatgctatcagtctgatgaagtttcccttatatgttattcgatgcttttttcttgctgtttttagaactctctttgtctttgactttttactgtttgggtaaaatgtgccttggagaaaaccttatgggattgaatctatatggagacctttaagtttcctgtgtctggatgtgtttgtctttcgcaagacttggaaagttttcagttattatcttgttaggcaagttttctatacttttgcccatctcttctctggaactctcaaaattcaattatttatttgctttatgatggtgtcttgtgtgtctcataggctttatctattcttttataatctttttttttttatctgacttggttatttgaaaagagacaagttctgaattttttctgtgtccccagcaaatctcatgttgaattgtaattcccagtattggaggtagggcctgataggaagtgattggatcatgggggtggtcctttatgaatggcttagcaccatcccctcagtgctgtttttatgatagtgagtgagtgagttgttgtgagatctggttgtttaaaaatgtgtagtgtgcatctcttccctctgtctcttcttcctgctttggccatgtgaagatgcctgctctggctttgccttctgccgtgagtaaaagctccctgaggcctcaccagaagcagatgttgccatgcttcctgtactacctgtggaactgtgagccagtttgaaacttcttttcaaaattacccagtcttggccaggcatggtggctcatgccaccagcctggccaacacggtaaaaccccgtctctactaaaaatacaaaaaattagccagatgtggtagggcatgcctgtaatatgagctacctgggaggctgaggcatgagaatcacttggacccagaaagtggaggttgaagtgagccaggattgtgccactgcactccagcctgggcaacagagtgagactctgtctaaaaaaaaaaaaaaaattacccagtccttggtatttcttcataggaatgcaagaatagcctaatacatccctgtatgatttctttggctgtaatgagtgtcagtgttgtctgtgaatttcttagtggcttaggctgtggttgttagtggaaactgcggtgagtctttggtggggatggggatgtcagatgggctggtccttgggcacagtggtggtgggtctgtatctgtagttgtgggtctgagctgggtcagttcttgggccttctggtgtcatgctcagatgctagtgattacagtggtgggctgagtggcattgccatatgcccctgggtggtgtgcatgatgttggtggtggcagtggcagtggtgtgccacttttgggccccgattggtgtgcatggatgccagtggtggtggtgttgggctgggcaagacagtctcctggcccccaggtggggtatgtgtgttgtggtggtgcagtcttggcatgttgatccctaggcccccatgaggtgcacataggtgttttcagctagatggggtggccccctttttatgcctttggacaacccacatgtgagttgctagtggtgggcagagtggccgatccacacacacttggatagcatgtgcagatgctgacagtgatggtggtgggtagtgtgggcagtcctctggccctgctaatggtgcatgcaggtggtggtgggctatgtgggcctattttcagttcctgggatggcatccaggcagactggtctccaggcaccctaaaggcccttgggaatcctactgctggaggggttgaggttgctgtcagtggcagtggccttgtgtaggtggctctcaggctgtggggagtgcatgcttctgttctttttgtctttggggcagcctccctggtgtgctatgctgaccttttctcaggatatagggtgatgcattggctatagtgcaggggacctggttgcactgctgggtccagctggtgtgtcttgatgcttcaggtggacatgggaagatgtcactggggctttagggatgtggttgtagggccctagtggaggatgtagtctagagggggctgtgatttcaaaatggcactatgctgtggctgcttgtgcctccagtgggtatgtaggacccggcagtaatgccttctctgcaataatgccattgtgtgggctcctgagatctccctctaatagtctcagggtccacaagggcctaggggctttcccatggctaggattgtgggagtctgcagtgggaacgtctatcacttggggatctctcatttacctttttttcacaatgaggagtgcctcctggcactgagccaaacctggctggctgccttgttttcctctccttttatgcctcagagctttcttgtcacttctgtgctgaatttcagtgttctttcttagaagctctgtttgatgtgtggttatctacttagtgttttggtccttctttgtgaaggaagtgagccttagtcgcctttggtcagccatcttgaagcccaccatcatctctctgttctgttttcgttttattcgagtaaagcattcttccatccagtgctcaactttgttgtgttttccttggcaactgtgataccaagatgcagtggacaaaagtgctaagacttctaatcctgaaaatagtcaagagatgtcactcgttagacatttgttagttcaattctatttataataggaattgttttcttcactttattgttggattgttccctgctaatttatagaaatacacttgactttgtatattgatcatgtgtcctgcaacattactgaactcgtttattaattctaatagtttttttttagtggattccttagaaatttctgtatagaagcttataccatcagctactagagatacttttacttctttctttccaatctggctgcctttttatttctttttcttaccaaatggcttttcctccactataatgttaaatagagctgacagtggtgaacatttttgtcttgttcctgatcttaaggggaaagcgttcagtccttcaccattaattatagtattagccatgatttttttttttaaacaggtggggctgggcatggtggctcacgcttgtaatcccagcactttgggaggccgaggtgggcctatcacgtaaggtcaggagttcaagaccagcctggccaatatggtgaaacctcatctctactaaaaatacaaaaactagctgggtgttgtggtgggtgcctgtaatcccagctacttgggaggctgaggcaggagaatcacttgaacccgggaggtggaggtttcagtgagctgagatcacgccattgcactccagtctgggtgacaagagtgagactccatctcaaaaataaataaacaggtgggctttatcaggtcaaggaagttcaattctattttagtttgttcagtgtttttattgcaaaaggatgctggaagctgggcatgctgatgtttgccatagttctagatagatgagaggctaaggtgggaggatcactggagcccaggagtttgtggccagcgtgggcaacatagcaagactcccatctcttaaaaaataaagacctgaatccaaaaatttctatgaggtaatatcagaaaaactcttctaaacattggcttaggcagagttcttgaccaagagcccaaaagcaaatgcaacaaaaataaaaataaatagatgggacctaattaaactaaaaagcttttgtacagcaaaagaaataatcagcagagtaaacagacaacccagagaataggagaaaatctttgcaaactatgcattcaacaaaggactaatatccagaatctacgaggaactcaaatcagcaagaataaaaacaaataatcccatcaaaaagtgggtaaaggacatgaataaacagttctcaaaagacgatatacaaatggccaacaaacatatggagaaatgctcaacatcactatcagggaaatgcaaatcaaaactacaatgagataccaccttactcctgcaagaatggccataattaaaaaataataataaaaagatgttgacgtggatgtagtaaaaagggaacacttttacattggtggtgggaatgtaaactagtacaaccactatggaaaacagaatggagattccttaaataactaaaagtagaaataccatttaattgagcagtctcaccacccaaaggaagtaagtcattatatgaaaaagatacttgcagatccatgtttatgtgtgctatagcagcacaatttgcaattgcaaaaataaggaaccagcctaaatgcccattaaccaatgagtgtataaagaaactgtgatatggacagcatggactactactcagccataaaaaggaacaaaataatggcatttgcagcaacctggatggagttggagactattattctaagtgaagtaacagaggaatggaaaaccaaatatcatacgttctcacttgtaagtgggagctaagccatgaggatgtaaagacataagaagagggataaaagacttcacattgggcaccgcatacactggtcaggtgataggtgtaccaaaatcttagaaatctccagtaaagaacttaccatataatcaagaaccacctgtttcccaaaaactattgaaataaaaaaggccactggcttttttcttgcatacatatattgtgattactatggtttttgtcctttattagtattacatagtacattaattgattttcatatgttgaactgaccttgcatttcctggaataaaaatcctacttgtaatgttgcttagtccttttttttttttttgagacagagttttgctctgttgcccagactggagtgcagtggtgtgatctcagctcactgcaagctttgcctcctgggttcacatcattctcctgcctcagcctcccgagtagctgggactacaggtgcccgccaccacgcctggctaattttttgtattttttagtagagacagggtttcaccatgttagccaggatggtctcgatctcctgacctcgtgatccaccctccttagcctcccaaagtgctgggattacaggcgtgaaccaccgcgcccggcccagtcctttttaatattgctggtaatattttgttgaagattcttgtgtttgtattaataaaaaatattactttgtagtttttgtttgatgtctttgtcttgttctgatattagggtaatactggccccatataattagttgggaaatgttctttcctttcgttttggaagagtttatgaaggattgatattaattatttgaatgtttggtagatttctccagagaagccatctgggctgtgcttttctgggctgtgcttttttttgtaggaagttttaaaagtactaatttgatctttttacttgttacaggcatattcagattctctatttcttcagtaattcgtctctttctaggaatttgtccatttcacgtaaattatctgatttggtgtacagttgtccataatgttcttttataatcatttcttacttttataaggtagttggtgatgttccatgtcttattcttgattttagtaatttaagtcttttaaaaaaaatcttggtcaatccaactaaaggcctgtcacatttatggatcttttcaaaaaaccaactttcagttttgccaattttctctattttccatttatttcctttaccttaatcattgtcattttttcctctgcttgccttagagttaattttctattcttttttccagtttcttatggtgaatgtttaagttatttgaaatttttcatcttttttattagagatatttatagcaataaatgttctcctaagcagttctttagccacctcttgtaagactttttatttttattttttgagacggagtctcgctctgttgcccaggctgtagtgcagtggcatgatctcggctcactgcaacctctgtctcccaggttcaagcaattctcctgcctcagcctcctgagtagctggaactataggcaccttccaccacgcctggctaatttttgtatctttagtagagtcggggttttgccatattggccaggctggtctcaaactcctgacctcaactgatctgactgcctcagcctcccaaagtgctgggattacaggcatgaaccaccatgtccggccgcctcttgtaagatttgacaggtggtagtctcatttttattcatctcaaagtcttttctgtttttctttgtgatttcctctttgactcactggttaattaggagtgtgttgtttaatttccacatatttgtatattccctaattttcctactgttacaggagatcgattatagtttgtgtaatttcagcccttttacatttattgaagcttgtttatggcataacaggctctatcaagtgtttcatgagcacttgataactatgctgctgttgttgggtggaatgttttgtaattgtctcttaggcctaaaacagacaatgttttgcccttaataagaaatatatgtaggtctctggttctttcccagttcttggaatgatccctttgatgtcctggatggagcatcaggggagtgcacctttgttagtttgaagatgggtgaagagacattactgtacaaagggagatgagaaaggaggaaccagtatggtgcctcaactttaagtgtgttctcaggcagatttatttgaggaagtcctataaaggagacaaaggatctggaaatgggttagcttaaaaccatttgtggttctttatcttttagtaggactttatttttctccaggggtatgtgtgccccagggtgaagataaattgaaaggatcttgtaaagagttaaggttaaggatttgcttttatatgcactgggaaactactgaagttttaggaaataaacattttgttttagtgaggttaatctgtagtatggataatgggaagaagagactagaactatggagcttatttagagtttatgcagaaagaaatttacattcaattcattaaaaacttgttgagaatttattttgtgttaggcatgggctgagctcctcttgttcaagaattcacaatcacattcagtgtttcaagtacagtaattttgatatgtcttaggtatggtggtggcacaagaaaagttactgtctatagtctgataaattatatatatatatatattttttgtttgtttgttttagattctgagctctggatgcagatatcacatacttactagatttcgccatttggatgtctcccagggacgtcaactacatgtctagatggagatcatgatctttagtcatctccagtctgttcttgttttagtatttttggctcaataaatgatgttagtcaggtaaagttacaattttgcaagtccatattcagttagtcaccaagtattaatgcttctaaatatctcttgaggtaagggtagcaggccaccattataccattatctctttttggactgctggatcaggttttttatttttatttttatttatttattttttaatttcagatgagctcttacaatattgcccaggatggagtgcagaggcagtttacaggagcagtcatcacacactgcagcctcaaactcctggggttatgtgattcctcctgccccagcctcctaagtggaactacaagcatacaccaccatgctgggcagaatcttcctgctttcaattttgctattctttctcccttttctgcactgtaacttcccaagtgattttaataaaaacaaaccatgtcttggcactccctttcttaaaacctttttattgcatcatttaggataaagtccacatttcttaaaatgacttaaaagcaacttggacttctggttcctgcttacttcaccagctttgtcccaatcaccaagctactaatctgccatattgaactttttgagtttaaaatgtggcatattctctgtaacctgctgttcttgcagatctggtcctgatttatgtctctgactacttcttttatttatttatttatttttggataggatcttgttctgttacccgaggctggagtgctgtggtgtgatcatggctcactgcagcctcgacctcctgggctcaagggactgtagatgcatgccagcacatctggctaatttttaaatttttttgtagagatggagtctcactatgttgcccaggctggtctccagcagtccttctgcctcagcctcctaatgtgctgagattacaggggtgagccactgcacccagcttctaactacctctctaagtctccctctttccagctgtattatccaaccaatcaagtatcttttagttcctaagagttattctttctcttgccttttggctctttgcacatgctcttctaacacttttactccttttcacccatttttgccttactcctattcattctttagttttcaggttgtttgttcaaggaggccttccttgacccctagaccaggtttaatttttctgccacatgcacccactgaaccttttatgtgctttagcaattgcactcaacatattttataaggattacttgtttttcttctccacagcactgtgagctttgaaaggacagcatctgggtctgtctggttcactactgtatctccagacctggcatcttgctagacacatggaaaatgctcagtgcatatgtactgaatgttgagaaatgactatcataattaactttgctcgggtggatcaggaaatgtctcagagacaaggaaatgcatgagttggggcttgaaaaatgagtaggtaggccaggcgtggtggcggctcatgcctgtaatcccggtactttgggagactgaggtgggtggatcacttgagcccaggagtttgaggccagcctgggcaacatagtaggaccctatgtcaacagaaaatacaaaaattagctaggtgtggtggtgcgtatctgtagtaacagctactctggaggctgaggtgggaggatcacttgagccttggaggttgaggctgcagtgagccatgatcatgccactgcactgcagcctgggcaacagagcaagacgctgcctcagaaaaaacaagaaaaaaaaatgagtaggtattttcaggatattggagtgagaatgagggtgatgaggggaagggcattttgggaggacagaacaccatttgcaaaggcacaaagatatgaaaaagcacaggccattaggcagctgactgcccatagttccaaccaggtagagtgtgaatttgagggatttttgagagatgggactagatgatgagatgatgaagaagagacaagatcatggagggccttaaaggtaattgtcttctggttggcattaggagccattcatgttaaggaggatattttaacatttattaaacttttgttatgtcttaggtttttttctaaaaatgtattatttaatacaacagtcttctttccgtcagctgtgattcatcttaagtgagtgaaggctagtatcttatttatcctgatacactaggtgtttataattatatcctaagcaagatcattattctttgaaatcagattttgtgtattatacttctctatatcccacagagaacttaggtcatttttggtacagttttgatatactcttatcaatgcctctttcaaaatgagtacagcataccagatgaatcctgtagaatagtgcttttactacctgtgttccttgctctctgctttgttaatgaaattgacaatggcattaatatttttgggtgtagttggccaggcgtggtggctcacacctgtaatcccagcactttgggaggctgaggtgggcggatcacgaagtcaggagatcgagaccatcctggctaacatggtgaaaccccatctctactaaaaaatacaaaaaatcagctgggtgtggtggcaggcacctgtagtcccagttacttgggaggctgaggcagcagaatggcgtgaacccaggaggtggagcttgcagtgagcggagatcacgccactgcactccagcctgggcgacagagcgagactccgtctcaaaaaaaaacttaaaagtataataataataaaattaaaaaaaattatatatatatatttattttttttttggtgtagtaattttcggtttatgttttggttatgtttatgtttatttgccaaagcttatcaagcttttgacatgaattacttttaagatttttttatttgtagttgatctttggaacctaaattaggaattttaatatttattcctgttaaactgttttagtttctaattctgactttttttaaatttggatcttatttatatatttgcataactaatagaggcttaaaaatcccatgatagggtattcaccactgtgatgcttcccttgcccattcagttctctactttttccacggttgttccttatatatttttctggagtttctctgtgcattcacaatactagcaaatattaatgcatattcttacattttgtttttcttttgatactaaaagtagcatgctatattcactgttcagcgaatttctccctctagttaatacttcttggagatcttttaatatagtccatagggagagtccttattttaaaaatctgaataatgttctagtacatggatatgccataatttaaccagttctctattaatggatatttgcattatgtacattttttgctaatagaaacagtgcttcagtgagtgaccttgtatatacttgccgatcctcatttacacttgtgcaaatatacctgtaagataaagttacagatgttggacatgtagaatctctgagtgtacgcacttgtctttcagtggtggtttaaagtttttttgtttttctttttttatatagatcttgcccatttcttagtttgttcttaggtagttacctttttgtagttgttgtaagtgggatcttttcaatgattgtatttctgttgattccatatatttatgtatgtgtgtatatatgtatgtgtgtatatataccttactcttattgtagctttttttctagttgattatcttgggttttttgagtatgtgaaatcacctacagaatagtgtttattttttccctttctgtccgcacctgatactaataacaaagtgtctttatgtttcctttttttaaattgagacggagtctcactctgttcctcaagctggagtgcagtggcgcaatctcagcgcactgcaacctccacctccctggttcaagtgatcctccttcctcagcctcccgagtagctgggattacaggcatgcgccaccatgcccggctaattttttggtattttcagtagagatggagtttcactatgttggccaggctggtctcgaactcctggcttcaagtgatccgcccacttcagcctcccaaagtgctgggattacatgcatgagccactgcacctggccgtgtttgtgtttacttttgcattattaaataatcttatacttcttacttggtttgtgttatattaagcattcacaatatatatcaagtatatcagaatatctaaatgatataatttcaattccagtggttacagatgaggccatcggtacctttaatctgcctctcaccttctttccttttcagttttttcttgtgtgtgtcattctgcattatcagggcatataacctttatatcctgtcactctaatctccatatttgttttattcttagttcagctatcaaatttattcagtgctcattgtcagctcttttttgtgaaatttcctcaaaactatcctgtttcctcaataagagatcatgagcaagatattccctgagtttttgggtgttcagcactgtttgtagcttttatactttattctctaaggacatcttggttgcatggaacatcttttgcttatattttctttccttcagtgtctttaaaatgtttctctagtgtctttcagtgttagatattgcagtggagaaatctgaggctagtatgactttaaacccctttcatttttctttttaagttttaaagtctaataaatcttctaggttatgtcttgtgttgagcattctgtgtcagtgtttcttggcacaaaatatttgttaaagtatttttcatcctcccacaagaaaacctttctgaattatatctctgtaattatatttctgaattaatcttctcttgttttgagtttgtttaggaatttcaattatgcatatattagattccttttgccatccgctctagctgtaatttttttctgtaatctcccttcaagtttggggggtgaattttttttttttttttttttttttttttttaagacagaatcttgctctgtcacccaggccagagtgcagtggcacgatctcggctcacttgtgctccacctcctgggttcaagccattctcctgcctcagcctcctgagtagctgggactacaggcgcctgccaccatgcccggctaattttttgtattttttagtagtgacggggtttcactgtgttagccaggatggtctcaatctcctgacctcgtgatccgcccacctcagcctcccaaagtgctgggattacaggcgtgagccactgcacccggctgtgggttgatgtttttaatcagtttggggaaaatatcagtcattatctttgtgaatattgtttttcttgtattctctttttttttaggactctagtagtaagttttttagatcttttgatcaagttttacatgtctattatactcttacttgttttttcctctctgtttcagtttagatattttcttttttttttttgttagtttttatttcatactcataaacttaactctgcaatccaactaggcatggaagagaatgaggaaaatatggaacccaaagacctgcagcaagagcacagtgattataggatgctgcgagcaaatggagtggaggggtgctctcctgagctacggaaggaatggtctgatggttaagataaagcacaagtcaaatttattagaattgtccacagtcggcaatggtgatcttctcactggtcttgccgtttctggatctagagcactccatggcctgcataatattaatgctattattcaccttgccaaagaccacatgcttgccatccaaccactgaggtcttggcagtgcagatgaaaaactgggaaccatttgtgttgggtccagcatttgacatggacaagatgccgggacttgtatgcttcagagtgaagttcttatcatcaaatttctccctatagatggacttgccaccagtgccattatggtgtgtgaagtcactaccctgacacataaactctggaataattctgtgaaagcaggaacacttataaccaaatgcattctttccagtgctcagagcatgaagctttctgctgtttttgaaactttgtctgctaacagcttgaaggagatgcagcccaagggcgtaccgtccacagtgatgtcggggttctgggcagtgtcgttgtctacaaagacagttcagatattttctattgatctgtcttcaagttcactaattctgtgttctgctttgtggtgaaacatttacaacctactcttttaataatgctctagannnnnnnnnnnnnnnnnnnnnnnnnnnnnnnnnnnnnnnnnnnnnnnnnnnnnnnnnnnnnnnnnnnnnnnnnnnnnnnnnnnnnnnnnnnnnnnnnnnnnnnnnnnnnnnnnnnnnnnnnnnnnnnnnnnnnnnnnnnnnnnnnnnnnnnnnnnnnnnnnnnnnnnnnnnnnnnnnnnnnnnnnnnnnnnnnnnnnnnnnnnnnnnnnnnnnnnnnnnnnnnnnnnnntaagtagctgggattacaggcgcgcatcaccatgcctggctaatttttgtatttttagtagaggcaggatttcaccatgttggcccggctggtcttgaactcctggtctcaagtgatccacctgcctgggcctcccaaagtgctgcgattacaggcgtgagccactgcgcctggctcagattgtctttttattgttgtgttgtaaaagttctttatatagtctagatacaagtcccttgtaagatatgtgatatatagatattttctccattttgtaggttgtctttttactttcttggtggtctttgtagtgcaaaagttttaaattttgatgaaatttaattttcttttttattgcttatgttcttggtttcacatctaagaaacagttgacaaattcaaggccataaagatttactcctgtttaagaattctgtagtttagctcttacatttaggtttaaacttttttgagataatttttgtttatgatgtgaagtaagaatccaagttcatactttgcctgtggatatctattgaaaagatgattctttctcctgttgaattgtcttggcacctttattgaaaattaattggatggctgggcacggtggctcacgcctgtaatcccagcactttgggaggctgaggcgggcagatcacgaggtcaggaaattgagaccatcctggctaacacggtgaaaccccgtctctactaaaaaatacaaaaaaaattagccgggagtggcagtgtgtgtgtgtagtcccagctactcgggaggctgaggcaggagaatggcatgaacccgggaggtggagcttgcagtgagccgagatcgcgccactgcactccagtctgggcgacagagcgagactctgtctcaaaaaaaaaaaaaaaaaaagaaaaaaaaaaagaaaattaattggacataaatttgaaggttatcccccccgccccagagtcttagttcttttcctttgacataattctatccttatgccactaccacactatcttcacaattgtaattttatagtaagttttgaaattgagaagtgtggatcctttatattttgtcctcattttcaagattgttttggatattctggatctctgtatctctgtttttttattgtgcttatatattacgacagtaaaaaaaagatatataattaaatttatagttttaaccatttgtaagtgtacagttctgtctatggccataccaccctgaacgcgccgatctcgtctgaaagtgtacagttctgcagcatcaagtacatacatactgttgttaaataaccatctccaccatctatatctagaactttttcatcttcctcagcttgaactctgtacccattaaagactgactcttcattccacactttcccagcccccggcaaccaaaattctacttttttctttatgaatttgagcactccgggaacaatgtattacagatactccttctcttttgatgagggtacatccaaaagcttattgtaagattgaaaaatcatgaattgaaccatcataagttgaggatcatctatagtggaatcatataaaattttccttttgtgactagcttattttacttagtgtagtactttcaaggtttatccatgttgtagcatgtcaagattttgttactttgtaaggctgaataatattccattgtaggcacgtaccatattttatctgttcatctatcagtggacacttggattactttcaccttttcactattgtatataatcgtgctagaacacgggtatacaaatatctgtccttgtcccctgcctttggatatatacgcagaagtggaatggctggatcatataattctgtttaatatcaaattaaaattaaatttgttaaatgaaattagatatttaattaactaaattaagtatttaatttaaattctttttaaattaaaataattatatttgattattctgtttaatttttttaggaattgctatactgttttccacagcggctgcaccattttacatccccaccagcaatgcaaaaaggttctaatttctccacacctttaatatttgttcttttttattttttcgtaatagccatccaaatgggtatgaagtggcatctcattgtgctttgatttgcatttccctaatgattagggatgttgaacatctttttatgtgcctgttgagcatctgtgtatcttctttgcaaaaatgcctactcaagtcttttgcctattttaagaatcaatttgggttgggtgttttggcccacacctgtaatcccagcactttgggaagccaaggcaggaggactgcttgagcccaggagttcaataccagcctgggtgacaagtaagaccccgtctctaaaaaaaaaaaaaaaaaaaatggaaaaaattagctgggcatggtggcacgtgcctgtagttccaactacaggaaggcttgggaggctgaggtgggagtattgcctgagcccaggagttcaaggctacaataagctgtaatcatgccactgcactccagcctgggtgaccgagtgagatattattaaaaaaaaaaaaaaaaatctgtttgtttgttgctgatctgtaggagttctttatcctgtcagttaattccttatcagatatatgatttaaaaatattttttcccattctgtggattgttgttgatgtagcctttgatgcatacaagttttaaattttgatgaaggcggactcttttttttttttcctgtacttttggtcatgaagaaatcatttccaaacccagtgtcatgaagcttttcccttatgttttcttctaagagttttacagttatagcttttacttttaagtctttgagccatttttagttcatttttgtatatgctgtgagataagggtccatccaactttattcttttgcatgtggtatccagttttccaccacctctggttgaaaagacagtcagttctttgttgaatgatcctggcactcttgtcaaaaatcaagtgatcatttatgtgagggtttgtttctaagatcacaactgatttttatatgcagatggttcttgacttaggatggtttgtcttatggtttttggactttactatggtgcaaaagtgatgtgaattgagtagaaatcataccttgagtattaatactaccgttctgtttttcactttcagtataatattcactaaattatatgaggcattgaacatcttataaaataggctttgtgttagatgattttgtgcagctgtaggctaattgaagtgttttgagcatgtttaaaataggctaggttaaattatgatgtttgatgggttagatattttaaatgaattttcaattaaagatatttttaacttacgatggatttatcagaatgtaaccacgttgttagtcgaggagcatctgtacagattgtgtatcctgcaatcttgctgaactagtttgctacctctaatagtttaatgtggattctttttttttttttcttttgagatggagtcttgctctgtctctcaggcggagtgcaatggcgtgatctcggctcactgcaagctccgcctcctgggttcacgccattctcctgcctcagcctcctgagtagctgggactacaggcgcctgccaccacgcctggctaattttttgtatttttagtagaaacggggttttaccgtgttagccaggatggtctcgattcctgacctcgtgatctgcctgccttggcttcccaaagtgctgggattacaggcgtgagccaccgcacctggatggattctttattaaaaaaaaaatacacataagatcctgtcttctttatttttttatttttatatcattttttaaaaatttagcttttacttttattattttttaaaataaacaaagctgcaatgttttcctctaaattccttagcataataaataaaattcccttttgcaacacacatggtacgtcattttatatttccttaatagtctcatgaatatcttttctcattgagattccacctgtgtccagtagaaggaaaacttagctgaaaggaacatgaaataggctgaaaaacaaaatttctaaattgctagtagccttagaacaccttaacacaatttcggagattcagctgctttgaaagtgggctgcagtctgtgtgagggcagtgctacttgaggttgattcagaatgtagtctttagggccccaagcttaaaatgtgggcctagattccacctttggtgtctttatccctgggaagccgtcaaaagtgctggccaggtcctcagcagctaatttccccaagggaaaaattaccctctcagttggattcacttttctgcactttaatcttcttttggatcttcacctgataatttttcaccatttttctgagctttttggtgtcgttaggctaatggctttgataaaatgtccgttcccatcccattactgggtatatacccacaggattataaatcatgctgctataaagacacatgcacatgtatgtttattgtggcactattcacaatagcaaagacttggaaccaaccaaatgtccacaatgatagactggattaagaaaatgtggcacatatacaacacggaatactatgctgccataagaaaggatgagttcatgtcctttgtagggacatggatgaagctggaaaccatcattctcagcaaactatcgcaaggacagaaaaccaaacaccgcatgttctcactcataggtgggaattgaacaatgagaacacttggacacaggaaggggaacatcacacaccggggcctgttgtggggtgggggcagcggggagggatagcattaggagatatacctaatgtaaatgacaagttaatgggtgcggcataccaacatggcacatgtatatatatgtcacaaacctgcatgttgtgcataagtaccctagaacttaaagtataaaaaaagaaaaaaaaaagaatagataaccttaaggtagggaggctttttaaattggaaagaagccccagctagaggctcaaagacaataaataaaaaaccacagaagtcagtaaaattaggtatataatgttaaaactaacattattcacattatggtatgtaaatgacattatataatacttagttttggtcatcaatatggtggtcattgtgcacgtctgaaattaagagagataggaaatatataaagagttgagaaatggggatgaattctacttctggtaaggtagggctgtatacttttaaccaatattcctactaaagatcttgtcatctttaaatggaagtagttttgtaccctactttctgatcctgatcttataaagcattcagtttttctttagtaagtgtgatgttacctgtgggttgaggaagttatattgtagtcctaatattctgaggttttttttttaatcatgaaagggcgttagattttgtcaaatgttatttctgcatccagaataaatcccgcttcatcatgtgtaatcatctttatgtgttatggatttttttccttgtgatatgtttgtttggttttggcatgagagtaagtaataattgccttgggagttgttccttcctttttttatttttttaaaagttttttttgaaggattagtgttcttttttaagcatttagtaaagttcaccaggacagatgccctttgaattacagtggggttatatcctaataagttcatcataagtggaaaatattgtaagttgaaaatccattaaaaaataccctgataagcccattgtaaagtcaaaaagttgtaagttcagatgcttttcaacttacagtggggttatatctcaataaaccattgtaaagttgaaaattatatttctaaccattgttaagtcagggaccatctgtctggtcttggacctgtgagaggcattgtgattactgcctcaatctcttttcatattagagagcaattcagatttttctatttcttcttttttatttttatttttgagatggagtctcgctctgttgcccaggctggagtgcagtggtgagatacacggctccctgcaacttctgcttcccgggttcaagtggtttctactgcctcagcctcctgagtagctgggattgcaggtgcgcaccaccacacctggctaacttctgtatttttagtagagatggggttttgccacattggccaggctggtctcaaactcctgacctcaggtgatccacctgctgcggccccccaaagtgctgggattacaggtgtgagccactgcacctggcctctatttcttcttgagtcagttttgatcatatgtttcattttagaaatttgtccatttactctagcttatgaaaaattttggcatacaattgttcaaagtatttctttttaatattttttatttttttaacgttggtagtaatagcttcactttcattcctgatattagtaatttaagtcttctctctgtttttcttggtcaatctggttaaatgattaatcaattctattgatattttcaaagaactaacatttggtttcatcgatttctttgctcagttttcaaattgactatggatattggtctatatgtatacaactcttagagcactttttctcaccaaaatgctaatggtcttgaacaagtttatattctcaggacatatttctttgtttgctgtgatcaaacactatttaattaattcactatttgtaggtggctttcctcgtacgactagctaatgacctactcagaaatttactttcgttggttttattttcatttctatttttgtgtagttctgtgatgagatgttgtattacatttttttttcttgatggatggtttcctgtgaattgggaatactgtgctgagtgcttagtctgtatgctaacatgtattcttttagcacagatttcatattattgcataataaacagaaataaatactacagaagctgtatacaattggcccttcatacccgtgggttctgcatctgtggattcaaccaacagcagatcaaaaatagaaaaaaacctaacaataccatgataaaaaatacaaaattattataggcatacagaatttatactgtattaggcattataactaatctagagatggtttaaagtatacaagagtatgtttataggttatttacagatactacaccattttatatcagggacttgagcatccatggattttggtatttaggaattcttggaaaccatcctgtatgaacactgagagatgactgtgtggaattatgctgtaaatactgtttataaccctttctacttaacatagtgtgaaaaaattgaatttcataaatatctacaaaatttaagaattagcagctcagtatgatgacacatacctgtagttccagctgcttgggtgagggggtgaggcaggaggatcacttgagccaaggagtttgagaccagcctggggaacatgacgagaccccatctcttaaaaattttttaaatgttaaaagagttagtgtatcttcttcctaatatgttgtttttcaagtcttcagttttattttgccacggataaatccttcattatatatagttaacaatgagtaatgttaaagggcatatttgttttgttttgttttgtttttagtagtggtgggatttcagtatgttggccaggctgatctcaaaatcctgacctcaagtgatccacctgctttggcctcccaaagtgctgggattatgggcttatttgttttgaagctgccactttcttaggtttttttttttttttttttttttttttgagacagagtctcgctttgtcgcccaggctggagtgcagtggcgcaatctcggctcactgtaacctctgcctcccaggttcaagtgattctcctgcctcagcctcccgaatagctgggattacaggcacgtgccaccattcctggctaatttttttgaatttttagtagagatagggttttaccatgttggccaggctggtttcaaactcctgacctcaagtaatctgcccatctcggcctctcaaagtgctgggattacaggcatgagcctccacgtccagcctttcttagaatttataaagtatctgacagacacagtagggaacagagccaaacagtctattaacttgtagatttattcttcatgatattcctgcaaataaagtataggcctgaaaatggatccatgattttagggagaaagctctactctctttcaggctgcctgcttttctagcaggtataatttatttatttttctttcctcctgtttttatattaattaaaaaaattaatttttaaagttttatttttaatggacacataattatgcatgtttatagggtacagtgtgatgttttgatacatgtacacattgtgtaatgatcaaatcagggcagttaggttttccatcacctcaagcacttgtcatttcttcctggtgagaacattcaaaatcctctcttctagctattttgaaatatacaatacattattgttaactgtagtcaccttactatgaaatagaacaccagaatgtattcctcctatctaactgcaactttgtttgaccaaacctctaaccattccccatcccttaaccacccccagcccctgcccctgtctctggtaaccgcggtcctattctctacatctgtgggatcaactttttaaaactccacatgagtgaaataataaggtatttgtccttctgtgccttggcttatttcacttaatgtcttctaggttcatccatcttgtcgcaagtgacaggatttcattctgtttttatggctgaatagtattctttttttaaatatgctttaagttctagggaacatgtgcacaacgtgtaggtttgttacatatgtatacatgtgccatgttggtgtgctgcacccattaacttgtcatttacattaggcatatctcctaatgctatccctcccccctccccccaccccacaacaggccccggtgtgtgatgttccccttcctatgtccaagtgttctcattgttcaatacccacctatgagtgagaacatgtggtgtttggttttttgtccttgtgatagtttgctgagaatcttggtttccagcttcatccatgtccctacaaaggacatgaactcatccttttttatggctgcatagtattccatggtgtatatgtgccacattttcttaattcagtctatcattgatggacattttggttggttccaagtcttagctattgtgaatagtgccgcaataaacatatgtgtgcatgtgtctttatagcagcatgatttataatcctttgggcatatacccagtaatgggatggctgggtcaaatggtatttctagttctagatccttgaggaattgccacactatcttccacaatggttgaaccagtttacagtgccaccaacagcgtaaaaatgttcctatttctccacatcctctccagcacctgttgtttcttgactttttaatgattgccattctaactggtatgagatggtatctcattgtggttttgatttgcatttctcttatgaccagtgatgaagagcattttttcatgtgtctgttggctgcatacatgtcttcttttgagaagtgtctgttcatatcctttgcccacttttggatggggtttttttttgttgtaaatttgtttgagttctttgtagattctggatattagccctttgtcagatgggtagattgcgaaaatattctcccattctgtaggttgcctgttcgctctgatggtagtttcttttgctgtgcagaagctctttagtttaattagatcccatttgtctattttggcttttgtggccattgcttttggtgttttagacttgaagtgcttgcccatgcctatgtcctgaatggtattgcctaggttttcttctagggtttttatggttttaggtctaacatttaagtctttaatccatcttgaattaatttttgtataaggtgtaaggaagggctccagtttcagctttctacatatggctagccagttttctgagcaccatttattaaatagggcatcctttccccattgcttgtttttgttaggtttctcaaagatcagatggttatagatgtgtggtattatttctgagggctctattctgttccattggtctatatctctgttttggtaccagtagcatgctgttttggttactgtagccttgtagtatagtttgaggtcaggtagcatgatgcttccagctttgttcttgtggcttaggattgtcttggcaatgcgggcccgtttttggttccatatgaactttaaagtagttttttccaattctgtgaagaaagtcattggtagcttgatggggatggcattgaatctataaattaccttgggcaatatggccattttcatgatatagattcttcctatccatgagcatggaatgttcttccatttgtttgtgtcctcttttatttcgttgagctgtggtttgtagttctccttgaagaggtccttcacatcccttgtaagttgtattcctaggtattttattctctttgaagcagttgtgaatgggagttcactcatgatttggctctctgtttgtccgttattggtgtataggaatgcttgtgatttttgcacattgattttatatcctgagactttgctgaagttgctaatcagctggaggaaattttgggctgagatgatggggttttctaaatatacaatcatgccgtctgcaaacagggacaatttgacttcctcttttcctaattgaataccctttatttctttctcctgcctgattgccctggccagaacttccaacactgtgttgaataggagtggtgagagagggcatccctgtcctatgccagttttcaaagggaatgcttccatactgaatgcctattcagtatgatattggctgtgggtttgtcataaatagctcttattattttgagatatgtcccatcaatacctaatctattgagagtttttagcatgaagggctattgaattttgccaaagcctggcagagacacaacaaaaaaagagaattttagaccaatatccctgatgaacatcgatgcaaaaatcctcaataaaatactggcaaaccgaatccagcagcacatcaaaaagcttatccaccatgatcaagtgggcttcatccctggggtgcaaggctggttcaacatatgcaaatcaataaacgtaatccagcatataaacagagccaaagacaaaaaccacatgattatctcaatagatgcagaaaagactgaatagtattctattgtgtatatataccacattaaaaaattctttcatccattaatggacacttatattgattccatatcttggctgttgtgaatagtgctacattaaacatgggagtgcagatatctctgacatcctgatttaatttcctttggatatatatgcagtagtgggattgtagaatcatatggtatttatattttttaagttttggaagaacctccatcccgttgtcctgaatggctgtactgatttacgtttccaccagcagtgtatgagagtttcctttctcttcacattctcaggaactttttttttgtctttttgataattgccatcctaactgggatgaggtaataactcattgtgattttgatttacatttctctgatgattaatgatgttgagcattttttcatatacctgttcatcacatttatgtcttcttttgagaaatctttattaattggattttttttttttttgctaccgagttgagttccttatattctggatattaacatcccttgtcagatgcatagtttgcagatatttttttcccattctgtagattgtctcttcactcttctttactgtgcagaatctttttagtttaatgtaatccttttttgttaaacatttctggtctgtgcttttgccagactgatgttatgaattgtttctcctatggtctttactagtagcattcaataatattcaatatcccttcataataaaaactctaaacatgttagatatattaatggaaggaatgtacttcagcacaataaagtccatatatgacaaacccatagctaacatcatactgaatggggaaaagctaaaagcttttcctttacaatatggacctagatgaagatgcccactttgaccactcctgttcaacacagtactagaagtcttggtcgagcacggtggttcacacctgtaatcctagcactttgggaggctgagggtggcagatcacttgaggtcaggagttcgagaccagcctggccaacatggtgaaaccctgtctctactaaaaatacaaaaattagccgggtgtgtgtggtgggcgcctataatcccagctacttgggaggctgagacaggagaatcgcttgaacctgggaggcagaggtgacagtgagctgagattgtgccattgcagtccagcctgggcgatagagcaagactctgtctcaaaaaaaaaaaaaaaaagttttagccagagcaattaggcaagagaaagaaataaagggtgtctaaattgggaaggagaaagtcaaattgtccctctttgcaggtggcatgatcttatatattgaaaactacagacttcaccaaaaaactattaaaactaagaaatgagaattcagtaaagttgcaggctacaaaatcaacatacaaagcctttcctctaagatctggaacaggacaaggatgcccactttcaccagttattcagcatagtactggaagtcctagatagagcaatcagacaagagaaagatataaagggcatccctgttggaaagggagaagtcaaattatccatatttgcagatgatattatcttatatttggaaaaacctgaagactccaacaaaaaaacaattagaactgataaattcggtaaagttgcagtatacaaaatcaacatacaaaagtcagtagcatttctatatgccaagattgaacaatcttagaaagaaaaaagtaatctcagttacaatagttacacataaaattaaatagttaagaattaaccaaaaaagtaaaagatctccataatgaaaacgataaacactgatgaaagaaattgaaggggacacaaaaaaaagaaaaaaaaatccgtgttcattgattggtacaatcagttttttttaaatgtgcattctacccaaagaaatctacagattcaagcactgcccatcaaaacagtgatgacattcttcacaaaaatagaaaaaaaaatgttaaatttatacggaaccaggatagacccagagtagccacagcattcctaagcaaaaagaacaaaactggaggaatcgcattacctgacttcagattatgctacatatagacgcatagaccaatggaacagaatagagaacccagaaacaaggtttgtctaaccctaaccctaaccgtaccttaactggcaggttagggttagagttaaggttaacacagctacagcgaactcattttcaccaaagatgccaagaaatacactatggaaaagacagtctcttcaataaatggtgctggggaaattggatatccatatatagatgaatgaagctagacacctatttcttgccatatacaaaaatcaaatcaaaatggattacaacctcaaactatgaagctactacaagaaaacattggggaaaatctccaggatattggtctgggcaaaaatgtcttgagcaatacctcaaagcacaggcaaccaaagcacacatggacaaatgggatcacatcaagttaaaaagcttcttcacagcaaaggaaacagtcaataaaatgaacagacaacccacagaatgggagaaaatatttgcaaactacgcatctgagaaaggattaatgaccagaatatataaggagctcaaacaactctataggaaaaaaatccaataatctgatcaaaaaatgggcaaaagatttgagcagacatttctcaaaagttatacagatggcaagcaggcatatgaaaaggtgctcaacatcattgatcatcagagaaatacaaatgagacctacaatgaaataccatctcacccaagttaaaatgacttatatccaaaagacagacaataacaagtgctggtgaggatgtggagaaaagggaacccttgtatgctgttggtgagaatgtcaattagtacaaccactatggagaacagtttggaggttcctctgaaaactaaaactagagctactggccgggtgtggtggctcacacctgtaatcctagcactttgggaggcccaggtgggtggatcacgaggtcaggagattgagaccatcctggctaacatggtgaaacaccatctctactaaaaatacaaaaaattagctgggtgtggtggcggacgcctgtagtcccagctacttgggaggctgaggcaggagaatggcgtgaacccgggaggcggagcttgcactgagctgagattgcgccactgcactccagcctgggcgacagagcgagactccatctcaaaaacaaaaacaaaaacaaaacaaaaaacaaaacaaaataaaacaaaaaaatctagagctactgtgtgattcagcagtcccactgctgggtatataccccaaagagaggaaatcaatatatcgaagagatatctgcactcccatgtttgttgcagcactgttcacaatagccaagatttggaagcaatctaagcatccatgaacagatgaatggataaagaaaatgtggtacacatacacaacggagtactattcaatcataaagaagaatgagatccttttatttgcaacaacatgggtgaaactgaagatcattatattaagtgaaataaaccaggcacagaaaaacagacatcacgttatcacttatttgtgggatctaaacatcgaaacaactgaattattagagacagagagtagaaggatagttactagagggtgcgaagggtagtgggtggctgggtgaggggaggtggagatggttaataggtacacaaaatagttacaaagaatgaacaagacctactgtttgatagctcaacagggtgactatggtcagtaacttaatttacattttaaaattacttaaagagtgtaattggtttgtaactcaaaggataaatgcttgaggggatggatacttcattcttcatgatgcacttattttcacattgtatgcctgtatcaaaacatcccgtgtataccataagcatatacacctactgtgtatccatttttttttaaaataaacataaattaacatataaaatatgtaacatttatatgtgctacgattattcaatctcaaaaagaaatcaagaaaacaatctcatatacaataggtaaaacaaaaaatacctaggaataaatttaaccacagaggtgaaagatttctacaatgataaactaatgttattaatgacaaaaactgaagaggacacacataaatggaaagatctcatgctcatggatttgaagaattaatatcattaaaatgcccatactatttcaaatgatatacagattcagtgcaatccctgtcaaagtaccaatgacattcttcacagaaatagaaaaaaaaaaatcctaaaattagtatggaaccacaaaagaccctaaatagctaaagtaatgttgagcaaaaagaaaacagctggaggcatcacactaattgtcttcaaaatatacaataaagcagtagtatcccaaacagtgtggtactagcataaaaacagacacacagaacaatggaacagaatagagaacctaaaataagtccacagttacagccaacttatttttgacaaaggtgccaacaatactcattggggaaagaatggtttcttctataaattatgctgggaaaactggatattcacatgcagaagaattaaactagactcctatctcttaccatttacaagaatcaactcacaatgggctaaacccttaaatgtaagacctgaaactataaaactactagaggaaaatgggaagcacttcatgacattgatctatattaatttaaaaaaaatcatttgaaagccaatgtagaaggaagatagttatggaaatgtaaagtttacataggttctgtgaatacacatgaaacactcaattttaaacaatgaaggctgttgttaatttacatgttcttgttaattagtgatgtggattaagaagacaggagtggtggtgagtgctccagagattgaaatttaatagtaagggcctcgataaagagtttgttaacgagtaaaagaactgctgatgttaatttcttaagtgcttatgcaattcattgtagttttatttatgagccaagcttagaatacacctttgatcttagacagctatatcattgttaatttgtggctacctgcaatgacttgagactacagaacctaatcctttcccctctaccttggagggttcaatgcaataaatcctagggtggaccatttatttttcacttggtagtcagagtaagacaccgatgagtatctgatgtttcttaacaattcccaagcctgtacaatattaagtgatagagcttggtagaactgcttttcaaagttttaaaaaatttgaaaagtttttgttcagaatttatcttccattgaggatttaaaacatttacagatttataatgctacaagtacttgcaaatatagccaaatattcccagagtatacagattaccaatagcagtttggatgtcttcagcagagatcaaatataaatatatgcatatatacacatgcaaatagactcatggtatatacattttttcacagcttgttttctttacaactgagaggcttgatatcagtatatattcacctccttcatcctttgcatttttatacacatttcagaatcagtttattgatttctacaaaaaagtttattagaattttgattgggattgcagagaatgtaatgattaatttagggagaatatatatttttacactattgagttttctaatccattaatatgatatatgtttatattaggcttttaatgtctctaatattttatagcttcttgtgtagagttcttctacatgtctcattagatttatttccagttacatggcattttttgatgttgttataaatggtgtattttcaaaacatttaattttctaattgtttattgatatatagacttaaaaatattcaccttgtatctagtgaccttgctacaatcatgtatttgttgtaatagtttatgtctatattcttttggattttttttacatacacagtcagacctgctgataaagacaattttatttcctcatttccaattattacacctttaattgccttatttgcatcgactggtcctgcatacagtgttgaatagaaatggtgacagtggccatcctcttcttgttcctaaccttagtgataaaatgttttgtatatcaccagtgtgtgtgatgtttcctatagacacatcatagatgccctttatcagattaaggaagtccccttctagtcttattttcttaagaatttttgtcatgagtggactttgaattttatcaattttttcatatatagaggtgatcatatgatttttttccttcattaattttctaatattaaaccaatcttgcattccttgaataatccccagttggtcatgatgcatcatcctttttatgcatagttggatttgatttgctttgtatttttttaaaaaatgtttttatttatattaatgagaaagattagccgtaattttcctttagtctcatgtcctcaggctttgctgtcatgctgagttcaaaatgaattccctctttggaagagattatttatgattggtgttatttttttcagatgtttcgacagattcactgataaagtcatcaggacctggcatttcatttgtgggaagtttttaattacagattaacttttctttaataaatataggactatttaaatttttaacttctctgccagtttttgtagattttgcctttctgtaaattcgtctcccatgtaaaatttcaaattagttggtataagtttttttgtgtaatatccttttatgatgattttaatgttttgattgctgatactgataatttgtttcttttcttttttcctaattagtttttctagatgtctgtcaatgttagtgttttcaaagaaccaatttttagattataaggcttgatttacggtagtggaagttcttcaagattgacagggcgtttcttcttatttttttcaatagttttgagagtagaggtaggttttggtttcatggatgagttctttagtgatgaaatgtgagattttagtgcacctgttacccgagcagtgtacactgtatccaatatgtagtcttttatttctcaaccccttccaacctccctccagcaagtccacagagtctattactctgtatgtctttgtgtcctcatagcgtagctcccacttatagatgagaacatatggtatttgctttcccattcttgagtttcttcacttagaataatggcttccagctccatccaagttgctgcaaaagacattattttgttcctttttatagctaagtggtattccatggtgtatatttaccacattttctttatccacttgttggtcagtgcgcatttaggttggttctgtgtctttgcaattgtgtgaattgtgctgctataaatatgcatgtggatgtgtctttttcatataatgacttcttttcctttgagtggatacccagtagtgggattgctggatcgaatggcagatctatttttaattctttaaggaatctccatactgttttctgtagctgttgtactaatttacactcccaccagcagtgtaaaagtgttcctttttcactacttccatgccaacatctattgttttttgatttttaaattatgaccattcttgcagaaggtggtgtcttattgtggttttaatttgcatttcccagaggattaatgatattgagcattttttttcatgtgtttgttggctgtttgtgtatcttcttttgagaattgcctattcatgtcctttttccagtttcttatgtgattttttttttcttgctgatttgagttccttgtagattctggatactagttttttgtcagctgcatagtttgcagatattttctttgtgggttgtctgtttactctgttgattatttcttttgctgtgcagaagctttttagtttaattaggttccattcatttgtttttgtttttgttgcatttgcctttgggtcttactcagggattctttgcttaagccaatgttcaggagagtttttttccatgttatcttgcagaatttttatggtttcaagtcttggatttaagtgttttatccatcttgagttgttttttgtatagtgatagatggggacccagtttcattcttctacatgtggcttgtcagttttcccagcaccatttattgaataaggtgtctgtattaatccatttttatgctgctgataaagacatacccaagactgggcaatttacaaaagaaagaggtttattggacttacagttccatgtgactgggaaggcctcacaatcatagtggaagataaaaggcacttctcacatggcagcagacaagagaagagagaatgtgagccaagtgaaacaggtttccccttatcaaaccatcagatctcatgagactttttcaataccatgagagcagtgtggggaacactgcccccatgattcagttatctcccaccaggtccctcccacaacacgtgggaattatggaagtacaattcaagatgagatctgggtggggacacagagccaaaccatatcagtgtttttttttcccagcttatgtttttgtatgctttgttgaataccatttggctttatttctgggttctgtatttttttccattggtctaactgcttatttttattccagtatcatgctgttttggtaactatagccctgtagtataattcaaagtcccataatgtgatacttaatattgctttgtctgttcaggctctcttttggttccatgtgaattttaggattgttttttctagttcttgggaaaaatgatgatgatattttgatgggaattgcatcgaatctgtagattgcttttggcagtacagtcatttttacaatattgattcttgttatctgtgagcatggcatatgtttccatttgtttgtgtcatctgtgacttttttttagcagtgccttgtagtttttcttgtagagatctttaatttccttggttaagtatattcctaggtattttatttttattttttgcagctgttgtaaaagggattgagttcttgatttgattctcagcttgatttttggtgtatggcagtgctactgatttgtgtacattgattttgttcctgagaccttactttactgaatttgtttgttagatctaggaatcttttgtatgacgggttttctaggtatatgattatatcattgatgaatagtgacagtttgtcatcttcttttccaatctggatgccctttatttctttctcttgcctgattgctggttaggacttctagtactatgtcaaagagaagtggtgaaaatgggcatccttatcttgttccagttctcagggggaatgctttcaacttttccccattcagtgtgatttgactgtgggtttgtcatatatagcttttattactttgaggtaagatggggcttttctttattctttgtattcttatatgaattttggaatcagtttgtcaatttccttaaaaaagttacgggattttgattgttatctatagattttttctgttgtgcatatgctttctttttcattagtttctgttcatttttatcatgagaattctgcttttcaaagcataatcaaatttatttgatgattcttttaaaaaatatctatttgtttgcttgtggtagataagaagctcctaatattatttttttcttaagtaattgatacaaacttgctcaaaaagtacacttgaacacaggatatccaagggacagagactctgttaatagaaatgtttttctacaagcacacatgcacccaccactcatggatagcaattttcccacaatgtattttattgtcccaaactgctaatattatttttcaaaatgtagattaaatggaaaggggcttacactttagaaagaggaattagtaaagaagggaaggtatacatttaagaaaatttagtgcttaattcagtgactctgaccatgtctcagtgtttaaaaatgctaattggtgtgtttatccttgcttttctagtgatatgcagctttcgaggatctgtccctcaagggttggtcttagaaataggagaaacagtccagattcttgaaaaatgtgaaggtgagtatggacctacaaagcacataaattgtgatcatttttggcagtattatatacatttattttgtgctaataagattataagcaataattctggagccataattagtcacatgatgaaatagtgttatataaaattcttcctgatctgtgttcagcataaaggtatgagcttttttgattctaatatattagcaacaattagataattaatttctggctgtcagaacacgttttttacatatatttatggggtacttgagatactttggtacagatatacaatgtgtaataatcacatggtacatgtagtatcatctcaagcatttacctttttttgtgttgcaaaggttccaattgtactccctcagttattaaaaaatgtgcaataaattattgctgactgtagtcaccctattgtgctatcaaatactagatcttattcattgtatctaactatattttgtgccctcttacttattttttatgaataggtaatctacccatgcttagctgcctttgaatagaactacgttatagtccatttatttgtatgtttccgtctgattggctgggcatctttagtcctaattagaacaggtcctcaaattttttttaatttttgtttatttttttttttttgagagggagccttgctcttgttgcctaggctggagcgcaatggtgcgatctcagctcactgcaacctctgcctcccaggttcaagtaattcccctgcctcagcctccctagtagctgggattacaggcgcccaccaccacgcccagctaatttttgtagttttagtagagataggatttcaccatgttggccaggctggtcttgaactcctgacctcagctgatccgcctacatcaacctcccaaagtgctgggattacaggcgtgagccactgcgcctggcctaaatatgtttaaatgtagtttggcttgactactgtcctcttctgtggcgtacatgggtatttctactgtaacatttacacattcttgagatggatcgtgttcttcagaatctgtaattaataagatttatgggaaaaatagggagaaattacacaaaatcagagtattaacaaaagcaaaattgatgccatggcaaataacttgggcagcctggactagcagttcagtacggctacaagccatctcagatggtataatgaagtagaactgttgcagtgtgggtatagagccaatgtatatgggagtggagctctaatctagttgggttcctgttaagaggggtatgggaggacatgtaacctaccatgatccaggaatcatatatatttaggagtacacttctctggaaagggagctacacgtaccgttttaaattttcttaaaaacagaagtataaattagcacccttttgtgataacaactctaagggaactaagaatagaaggtaattttctttatctaataaatgatagctactaaaatacctgcagcaaacatcacattcggtcataaaatattgaaagagttttcactgagatctaaaagtgagacaagaatacctactgtcttactctgtttatgttttgctataaaggagtacctgaggctgtataatttataaagaaaagggatttatttgcctcatggttctgtaggctgtacaagaagcatgacaccaacttctgcttctggtgagggccttaggaagcttccactcatggcaaaagtcaaagagaagcctgtacgtgcagagatcacatggcgagagagaaagcaagagtgaggggaggtgccaggctctgtttaaaatttttattttttaattgacaaataatagttgtattcatgggtacatagtgatgttttggtgcatataatatatagtgatcagatcagggtaactagaatatccattatcccaaacatcatttgttttggttgagaaagttcaatattttccttctagctttttgaaactatatattattattaattatagtcatcttatgtgggatagaacattagaactgattctttttatctagttgtaattttgtatcctttgacaaatctcttcaaatcctcccttccccttcccctccagtatccttcattcaggatttttttgttagcttccatgtatgaataagaatatgaggtgtttaactttctctttttggcttatttcacttaacataatgtcctctagttccattcacattaccatgaatggcaggacttcagtattttttatggcagaatagtattccattgtgtatatacaacatattttcttaatccatctgttattggacacttaggttgattccatatcttggctgttgtgaatagtgctgcaataaacatggaagtgctgatgtctcttcaatataatgacttctgttccattggataaaatcccagtggctccacaaagagatcttgagaccaaaaaataaaaaataaaaataaaaaaaaaaagaatcccactggggtgggattgctagatcatatagtagttcttttttttttttttttttggagacagggtctcattctgtcagcaggctggagtgcagtggtgccatcacagcttactgtagcctcgacctccttgggcttaggtgatcccacctcagcctcctgagtggctgggactacaggtgcacaacatcatcaggcctggctaagttttgtattttttggtagagatggggttttgccatgttgcccaggcaggctggtcttgagctcctgggctcaagtgatctgcccacctcagccttccaaaatgctgaaattagaggcatgatctagcacactcagctatatagtagttctatttgtagtattttttttaatttgaaatatttatttatttattttaagttttgttttaggttcaggggtacgtgtacacatttgttatattggtaaactcatgtcacaggggtttgttgtacagatgatcttgtcacccaggtattaagcctagtatccattagttatttttcctgatcctctgcctcttcctaccttccattctctggtaggccccagtgtctgttgttgccctctgtgtgtccatgtattctcatcttttagttcccggttgtaagtgagaatatgtggtatttggttttctgttcccatgttagtttgctaaggataatagcctccagctccatctatgttcctgcaaaggacaggatcttgttcttttttatggctgtatagtattccatggtgtatatgttccacattttctgtagtctacaattgatgggcatttagattgattccatgtctttgctattgtgaatagtgctgcagtgaacatacacatgcatatgtctttatgatagaatgatttatattccttcgggtatatatgcaatattgggattgatgggtcgaatggcagttctgtttttaggtctttaggaattgccatactgtttttcacaatggttgaactaatttacactcctgcctacagtgtttaagcattcttttatctcagcagtctcaccagtacctgttatttttttttttttttttttttttttgagacggatctcgctctgtcgcccaggctggagtgcagtggcgcgatctcggctcactgcacgctccgcctcccgggttcacgccattctcctgcctcagcctcccgagtagctgggactacaggcgcccgctaccacgcccggctaattttttgtatttttagtagagacggggtttcacttgttagccaggatggtctcgatctcctgacctcatgatccgcccgcctcggcctcccaaagtgctgggacctgttattttttgagtgtgtgtgtgtgtgtgtgtgtgtgtgtgtagcttttaaaaaaaattcttttcaaaattaagtttttttatttcaatagggtttttgggaacaagtggtgtttggttacatgagtgagttctttagtggtgatttctgagattttggtgcacccatcacccgagcagtgtacactgtacccaatgtgtagccttttatccctcacccacctcccacccttccccccaccgagtccccaaagtccgttgtatcatgcttatgcctttgcatcctcatagcttagctcccacttataagtgagaacatatgatgtttggtttttcattcctgagttacttcacttagaataatggtctccaattccatccaggttgctgtgaatgccatgattttttttttttttttggctcatggctgagtagtccatggtgtgtgtatatttgtgtgtgtgtgtgtgtgtgtctgtaccaccacacgttttctttatgcactcattgactgatgggcatttgggctagttccatatttttgcagttgcgaattgtgctgctataaacatgcgtgtgcatgcgtcttttttgtatgatgacttcttttcctctgggtagatatccagtagtgggattgctggattgaatggtagatctactttttgttctttaaggaatctccacactgtttttcatagtggttgtaccagtttacgttctcatcagcagtataaaagtgttctcttttcaccacatccgtgccaatatcttttttttttatttttaaattatgatcattcttgcaagagtaaggtggcatctcattgtggttttaatttgcatttcttagatgattaatgatgtttagcattttttcatgtgttcattggccatttgtctatctccttgagaagattctcaatggacaattcttgagaattgtgtattcatgtccttagcccattttttgatgtgattatttgtttttctcttcttgatttgtttcacttccttgtagattctggatattagtccttcgttagatgcatagtttgtgaagattttctcccactttgtggattatctgtttactctgctgattatttcttctgctgtgcagaagctttttagtttaagtaagtcccatccatttatctttgtttttgtttcatttgcttttgtgtttttggttatgaagtctttccctaagccagtgtctagaaggggttttccgatgttaccttgtagaattctcatggtttcaggtcttagatttaagtctttgatccatcttgagttgatttcatacctttttttgagatggagtcttgctctgttttccaggctggggtgcagtggcatgatctgggctcaccgcaacctccgcctcccaagtttaagtgattttcctgtctcgacctcccgagtagctgagattacaggtgcctgccaccacgcctggctaatttttgtatttttagtagaggtgggtttcaccacgttggccaggttgatctcgaactcctgacctcaagtgatcctcccgcctcagcctcccaaagtgctgggattacaggcatgagccactgcacccatccttgagttgatttttgtataaggtgagagatggggattcagtttcattcttctacatgtgacttgccaattatcccagcaccatttgttgaatagggtgtgtcctttccccactttatgtttttgtttgctttgtcaaacatcatttggctataagtatttgggtttatttctggattctctattctgttccatttgtccatgtgcctatttttatactagtaccatgctgttttggtgactatagccttatagtatggtttgaggtagggtaatgtgatgcttgcagatttgttctttttgcttagtcttgcttcggctatgtgggctcttttttggttccatatgaattgtagatttgttttttctagttctgtgaagaatgatggtgatattttgatgggaatcgcattaaatttgtagactgcttttggcagtgtgttcattttcacaatattgattctacccattcatatgcatgggatgtgtttccatttgtttgtgtcatctatgttttctttcagcagtgttttatagttttccttgtagaggtctttcacttccttgattaggtatattcgtaagtattttattttattttatttgcagctagtgtaaaaggggttgagttcttgatctgattcttagcctggtggctgttggtgtgtagcagtgctacaaatttgtgcacatcaattttgcatcctgtggccaggcacggtcgtcacgcctataatcccagcactttgggaagccaaggcgggcagatcacctgaggtcaggagtttgagactagcctggctaacatggtgaaacgctgtctctactataaatacaaaaattagctgggggtggtggtgcacgcctgtaatcccagctacttgggaggctgagccaggagaattgcttgaacctgggaggcagaggttgcagtgagctgagattgtgccattgcactccagcctgagcgacaagagcaaaactccatctcaaaaaaaaggttgtattctgaaacttttctgagtttatttttcagttctaggagctttttggatgggtctttagggttttttaggtatatgatcatgtcattggtgagcagtgatcatttgactgcctctaccaattcggatgtcctttatttctttctcttgtctgattgctctggctaggacttccagtactatgttgaagagaagtggtaaaagtgggcatccatgtcttgttccagttctcaggtggaatgcttttgtcttttcctcattcaatataatgttggctgtgggtttgtcatagatggcttttattaaggtatgtcccttctatgccaattttgctgagggttttaatcataaaggatgctggattttgtcaaatcctttttatgcatctattgagatgatcatgtgatttttgttttaaattctgtttatgtagtatatcacgtttattgacttgcctatgttaaaccatctctgtgttcctggtatgaaacccacttcatcatggtggattatcttttaatatactgttggattcagttacgtagtgttttgttgaggatttttacatctatgttcatcaaggatattgatgtgtagttttctttttttgttatgtcctatcctggttttgatattaaggtgatactggctttatagaatgatttagggagtccctctttctctatcttttggaatagtttcaataggatttttaccagttctttgaatggctgatagaattcagctgtgaatccttctggtcctggactttttttgttggcattttttttttttaattaccatttttgtctcactgcttgttatttgtctgttcagagtttctgtatcttcctggtttaatctaagagtgtcgtgtatttccagaaatttgtccatctctaggttttctagtttgtgcccataaagatgttcatagtagccttgaatgatcttttgtatttctttggtattgcttgtaatatctcttgttttgtttctaattgagcttatttggattttctctcttcttggttaatctttctaatggtctatcagtgttattcatcttttctttttttctttaatcagctgatatgaaattataaaattctagaagtctgagtatttgaaacttacaaaagtcaccagaaaatgcaagcatattgggctttagtttggtgtttcccttggtttagatgacagtccctctgtgagctcaaggtcgtcttcttgtttatttccttagatctgttgtttcagtgacaaccacagaactcttagtggaggccaaggagagtctgagaactaaagaaacgcccaccatttctttctttgcacactaacacatgggaacttatctcctggagaacacgcttaaggagatggatgttaatgatgctgtgctgaactgttcttctctgccaactgccacagaaagttgtccgcactctggcctttatgatttaaagttgtccttactctggcctttatgatttatgaaatcttttgccacagatttcacagataaagggtttctctccagtgtttgttttcatgtgttcatgaaaatactgcttcgtgttgaaatccttgccacaccactggcacatgaactgtttgtgcccaatgtggatgctcatgtgggtgtgtagctggtaattgtactgaaacctttcgtcacagttctcgcatctgaaggacttctctccagaatgctgcagggagtgccccatgagtgacatactgcatttgaatgattttccacaggtttcacatgtaaatggcatgtctttcatgtgtgcaaccatgtgttttcgcacatgagccatggcatagaattttttctcacaaatttcacaggaaaatttcttttcttcatatccatggacgatcttgatatgttcatgaaggatccagtttcttgaacgatttattacaggcaacaaactaaatgtttttttcacagtctgtttgccggtgaagatatagctcactttccaggacaaacttattgccacatttatcacaaatctgcatgtgcctatgagtaatattcatttgcttctccagacaccagtgagcattaaataccctggggcacacgcctgtaatcccagcactttgggaggctgaggcgggctgatcacctgaggtcaggagttcgagaccagcctgatcaacatgtagaaaccccgtctctattaaaaatacaaaattagctgggcgtggtgatgcatgcctgtaatcccagctactcgggaggctgaggcaggagaatcgcttgaacccgggagatggaggttgtggtgagccgagatcgcgccattgcactccagcctgggcaacaagagtaaaactgtctcaaaaacaaaaaacaaccctgggtcacttctcacaggtcacacttagctttctgcactggtgcttcaggctcctttgtttcccgcttcttacgcttaggtggccctgcactcttcctgcaacctcttgtagttctgggagtaggggaagtggtagctgcagcaacagaggcagctctcctcattcttctttctgtaacgctgactttctctgttatcttctcctttttcttctgcttatcattctctccatagtcattgctgttatctgtggccccttcctcactctcttcctcctcattgtttaagaacaggagtctctttggattgagaagaggtacccttttcccctttaggtacatttaatgtttgattattaaggtttacctccactatgatctgctcccttttgtaaaagacttcttcctcttcttcctcctcctcttctgtgtcatcagaattctcctggtcttccttaatagcatgcacatcagactctgctcctgtctccctgaaatgtggctgttcttctgtttcatggagatgtagtttgctcatcttggtgtccacaaacacagaataaggacttcctggttccctttgttacactttggtggacaggtcaagttccttgtggcaccatgatgaaagctggatggcacttgcccatgacggctatcatcttgtgccattcctgctacaggcacagcacagttttcaaccagctcctgacgagaagtggctgtgtgcctcattggtaaatgactcaatttattaagcagttcagactgtaaagaaaatagctttaaaacaaggtaattattaagactaaaatatttttccatccctaagaatcactcaaatgaaaaaaagatattcctggaaactgaattcttccattgttgcagcaccaaagcataagtcaaaaaggtttggtattatggcaagagcagaccactagtgatttttcttctgaagagaactacaagggacttggtgcatcttatctgggccagccacctccaccgcctagatcaatgccttggcagtccttccctgcagtggggggactgtagccagagtcacaacctccagccaggctggcccctcactcctgcccaatgtctgtcctcaggactgctcctcagacctggcctcggctgctggccacagtgctatgtggccaccactcccatgtctctggacttccttctgagtgcctgagggcaaggagggtggcagggtgggcagagcgcagggagggaggcaggggaggggggtgggtgtgtggatgtacgtgcagggagggaggcgagtggctgcgagggcgcgtgcccgccccgtccccttcctttgttggccacccccctttattatcttttcaaagaacgaggtttttgtttcatttatcttttgtattgtttcttttttgtttgtttgtttccatttcatttagttctgctctgatctttgttatttcttttcttctgctgggtttgggtttagtttgtttttgtttctctagttccttgaggtgtgaccttagactgtcttcttttttctcttttagactttttgatataggtgtttaatgctaagaacttttctcttagcacctcttgctgcatcccagaggttttgatagattgtgtcactattatgcagttcaaataacttttaatttccatcttgatttcattgttgacccaatgatcattcagcagcaggttagtttccatgtattttcatggttttgagggttccttttggagttaatttccaattttattccactgtgatctgagagagtacttgatgtaattttggttttcttaaatttatagagagttgttttgtggcctgtaatatgatctatcttggagaatgttccatgtactgatgattagaatgtatattctgcagttgttgggtagaatgttctgtaaatatctgttaagtccatttgttctagggtatagtttaagtccattgtttacttgtggtctttctgtcttgataacctgtccagtgctgtcagtggattattgaagtccgccaccattattgtgttgccatccatcacatttcttaggtctagtagtaactgttttataaatttgggagctccagtgttaggtgcatatatatctaggattctgatattttcctgttggactagtttttaaatcttttttgtttgtttgtttgtttttaagacagtctctctgtctgtcatccaggttggaatgcagtggtgtgatcttggtgtcatcagtggtgtgacctgtgccttctgggttcaagcgattcttgtgtctcagcctcctgagtagctgggactgatagtcatgcactagcatgcctggctaatttttgtatttttagtagagatggggtttcgccatattggccagaccagtctggaactcttggccacaagtatctgcccacctcggcttcccaaactgttgagattacaggcatgagccaccatgcgtggcctagtcctttcatcattgtataatatccctctttgtgtttttttaactgcttttgctttaaagtttgtttcatctgatgtaagaatagctcctcctgcttgctttgggtgttcatttgcatggaatatctttttccaccgttttaccttaagtttatatgagtccttatatgttaggtgagtctcttgaagacaacagatgcatggtttgtgaattcttatctgttctgccattctgtatcttttaagtggagcatttaggccatacattcagtgttagtattgagacgtgaggtactattctgttcatcattgtggttgttgcctgaataccttgtttgtttttttctcatttgctattgttttacaggtcctgtgagatttatcctttaaggaggttctattttggtgtattttgaggtttttgtttcaatatttagagcttttttttttttttttagcagttattttagtgctggcttggtagtggcagattctttcagcatttgtttgtctgaaaaagactatctttccttcatttacgaagcttagttttgctagatacaaaattcatgactgataattgttttgtttaaggagactaaagataggacctcaatcccttcaagtttatagggtttctgctgagaaatctgcttttaatctgataaattttcctttataggttacttgatgcttttgcctcacagctcttaagattctttccttcgtcttgactttagataacctgatgactgtgtgcctgggcgatgatcttccattctgactggtgtgagatggtatctcattgtgattttgatttgcatttttctagtgatcaatgatactttttttcatatgcttcttggccacatgaatgtctttttttgagaagcatctgttcatgtcctttgcccactttttaatgttttttttgttgttgttataaatttgtttaagttccttgtagacgatattagacctttgtcagatggatagattgcaaaatttttctcccattctgtaggttgtttactctgttgatagtttcttttgttatgcagaagctcctaagtttaataagatcccatttgtcaatgtttgcctttgttgtgattgcttttggtgcctttgtcatgaaatctttgcctgttcctatgttccgaatggtattggcctaggtgatctattacagttttggggtttacatttaagtgttaaatctatcttttttttttttttttttttttttgagacggagtcttgctctgtcgcccaggattgagtgcagtggtgccatctcggctcactgcaacctctgcctcccgggttcaagtgattctcctgcctcagcctcccaagtagcagggactacaggtgcacgctaccatgtctggctaatttttgtatttttagtttcaccatgttgaaatggggttttaccatgttggccaggttggtctggaactcctgacctcaggtgatccacccgcctcggcctcccaaagtgctggaattataggtgtgagccactgcacttggccaaatgtttaatctgtcttgagttgatttttgtgcatggtgtaaggaaggggtccagtttcaatcttctgcatatggttagccagttatcccagcaccatttattgaatagggagtcttcttcaatgcttgtttttgtcaggtttgttgaagatcagatggtagtaagtgtgtggccttgtttctgggtgctctgttgttttccattggtctctgtgtttgttttttgtactagtaccatgttgttttagtttctgtggccctgtggtatagtttgaagttgggtagcatgatgcctccagctttgttctttttgcttaggattgccttggctattcgggatatttttttattccttggccattcgggatttttttttgttccatgtgaattttaaaatagatttttctagttctgtgaagaatgtcattgtagtttgataggaatagcattgaatctgtaaattgctttgggcagtatgaccattttaatgatatggattcttctctgttagcatgaaatatttttccatttgtttgtgtcatctctgatttttttttttttttgagcaatgttttgtagttctttttgtagacgtctttcacttctctggttagctatatttctaggtatttcattctttttatggcagtgaatgagattctgttccgatttggctctcaagttggctgttgttggtgtataggaactctagtgatttttgcacgtagattttgtattctgagactttgctgaagttgtttttcagcttaaggagctttggggctgacactgtggggttttgtaggtataggacatgtcatctacaaatgggtagtttgacttcctctcttcctatttggatgctgtttatttctttttcttgcctaattgttctggaaaggacttccaatactatgttgactaggagtggtgagagagagcacctctgtcttgtgccggttttcaaggggaatgcttccagctttatagattggttatgacgttggctgtgggtttgtcatagatatctgttactatttcaccaagcttattgagagtttttaacataaatggtgttgaattttaccaaaagccttttctgcatctgttgagatgatcatgtggtttttgtttctagctctgtttatgtgatgaatcacgtttattgatttgcatatgttagagcaatcttgcattccagggataaattggtcatagtggataagctttttgatgtgctgctggatttggtttgcgaatatttcattgaggatttttgcactgatgttcatcgaggatattggcctgttctctgccaggttttgatatcaggatgatgctggcctcatagaatgagtcaaggagaagtccctcctccttagttttttagaattgtttcagtaagaatggtaccagctcttctttgtacatctgttagaatttggctgtgaatttgtctggtccttggcctcttttggttggttggaagtttattaaaatttagtttcagagctcattattggtctgttcacatattcagtttcttcctggttcagtcttgggagggggtatgtgtccaggaatgtaaacgtttcttccagattttttggtttatatgtatagaggtgttcataatagtctctgatggttatttgaatttttttggggtcagtggtaatatcccctttgctgtttctaattgtgtttatttggatattcacttttttcttctttattagtctagctagccatctatctgttttattaattaaatttatctttttcttttttaaatttttttgaggcagagttttgctcttgttgcccaggctggagtgtagtggcatgatttcagctcactgcaacctctacgtcctggcttcaagtgattctcctgcctcagcctcccgtaggtgggattacaggcatgtgcaccacacccagctaatttttgtattttttagtagagacgggatttcgccttgttggtcaggctggtctcgaactcctgatctcacgtgatccacctgcctcagcctcccaaagtgctgggattacaggcgtgacgaccttgcctggcctattttattaattttcttttcaaaaattcaacccctgccttcaatgatcttttgaatggtttttcatgttttcctctccttctgtgcacctctgatttaggttatttcttgtcttctactagctttgggcttgatttactcttagctccctaattcttttagttgtgatgttagattgagacagatctttctttttggtgtaggcatttagtgctatatattttccttttaacactgccttagctgtgtcccagagattttgggtatattatatttttgttctcattagtttcaaagaacttgttgatttttgccttgatttcattatttacccagaagtcatttgggagcagtttatttaacttatgtgtaatcgtaaggttttgagtgaatttcctggtgttgatttttaatttgattgtgctgtggtctgacagagtggttgttatgatttcacttcttttgcatttgctgaggagtgttttgtgtccgagtatgtggtcaattttagaatgtgtgtgatgtggcaatgagaagaatgtatgttttgttgcttttgggtggagagttctgtaaatttctatcagatccatttgatccagtgctgagttcaagtactgaatacctttgttaatttctgccttgatgatctattgaatactgtcagtggcatgttgaagtttcccactattgttgtgtgggagtctgtgtctctttgtaggtctctaagaacttgctttatgaatctgggtgctcctgtgttaggtgcatatatatttaggatagttaagtcttctcgttgaattgaatcctttaccattatgtaatgccctaatttgtcttttttgatcttcgttggtttaaagtctgttttgtctgaaattaggattgcaacccctgcttttttctattttgtcttgcttggtagatttttctccatccctttatttcaagtctgtgggtgtttgcatgtgacatggatctctcgaagacagcattttaatgggtcttggttctttgtctagcttgctactctgcaccttttaattggggcatttatcctgtttacattcagggttattattgatatgtgtagatttgatcttgtcatcatggtgttagctagttaatatggagacatgtttgtgtggttgctttatagtgttactggtctgtgtgcttaagtttgtgtttgtggtggctggtagtggtctttcctttccatatttagtgcttccttcaggagctcttataaggcgggtctgagggtaacgaattttctcagtgtttgattgtctgaaaaggatcttatttcttgttggcttgtgaagctcagtttggccagctatgaattctgggtttgaatctctcttttttttttaaagaatatggaatattggcccccaatctcttctggcttgggtttctcctgagaggtccactgttagtctgatgggtttgcctttgtaggttacctgatctttcattctagctacctttaacattttttctttcattttgactttggagaatctgatgattatatatcttggagatgatcttcttgtgaagtatgttactggggttctctgcatttcctgcatttaaatgttggcctgtcgaggttggaggaagctctcattgttcatatcctgatatatgtttttcaagtttcttacacactccctgtctctttcagggacaccaatgagttatggattttgtctcttttttatttttttgagatggagtcttgctctgttgccaggctggagtgccgtggcatgatctcagctcactgcaacctctgcctcccgggttcaagtgattctcctgtctcagcctcctgagtagctgggactacaggtgcgtgccaccacacccagctaatttttgtatttttggtagagatggggtttcaccatgttggcaaggatggccttgatctcttgacttcatgatctgcctgccttggcctctggatttggtctgtttacataacccatatttcttggagattttgttccttttcattctttttctctgttattttctgactgttttatttcagaagcccagtcctcaagctctgagattctttcctcaccttggtctgttctgctgttgatacttgtgattgcattatcaaattcttatagtgtgttttgcagctctttcaggtcagttacattcttttctatactggctattttgactttcagctcttgtatcattttattgtgatacttagcttccttgggttgggtttcgacatactctgttatcgcaaggatcttcctccctaaccatgttctgaattatatttctgtcattttagccatctgagcgccattgggaaccctttctggagaggtggtgtggttattttttttttttttcagacagagtctggctctgtcccccaggctggagtgcagtggtgtgattttggctaactgcaacgtccgctcccgggttcacgccattctcctgcctcagtctcccgagtagctgggactataggcgcccaccaccatgcccagctaatttttttttgtaatgttagtagagacggggtttcaccatggtctggatctcctgacctcgtgatccgcccccctcggcctcccaaagtgctgggattacaggcgtgagccaccatgcccagccattttttttttgttttgttttttttgagatggagttttgctcttcttgcccaggctggggtgcaatggtgcaatcttggctcactgcaacctctgcctcccgggttcaagctattctcctgcctcagcctccctagtagctgggattataggcatgcgtcaccatgctcggctaattttgtatttttagtagagacggtgtttctccatgttggtcaggctggtctcgaactcccaacttcaggtgatttgcccaccttggcctcccaaagtgttgggattacaggcgtgagccaccgcgtccagccagtgtggttgtttatatgaaagaaggcactctgactttttgagttgtcagagttattgcactgattctttttatctttgtgggctgatgtttcttcagtctttgaagttgctgacctttagattttttttttttacttttatcctagttgatgaccttgagggttttgattgcggtataaggtgaattcagccgactggcttagtttgcagaagattttagggggctaatgctcactcacaacttctgggctgcatgctctaactctgggtgacttttgttgtatcctgactttgctctctgactccttgaggttaggaatccactgtgctggtgggggtgggggctgaggtgctcctggaacacaggtcacttacactccaattggagtgcattttgtagtgtggtggcagcaggatccatgtttgtttgcatgtgctgccagcagcagcagtgacaacatggcagagtgcacactgctgcatcagggtgctagtgaatgccgaggttcttgcctttgtgcaggcattcaccacagtggaagaggcggtatggctggggggaggttgggggcttctgctggtgactgtgcaaatggttgtgctggtggtggtgtgaggatggaggtggggcgctgtcaggcgcaggcctgtgtgttatggggtagtcactcagaaagtgggagagtccgctcttctctaggtctagtttcactcctgtggcagcgttggtgcaagggcagggcattggaagggatgggtctgccttgctttgtgccctgcaaggctctgactgcactggtggttcagctgtgtctggttggtcatcttgtcctctctgttgtcccggacagcagatgagacctaaggcgcaacctttccagctaaatgtcagcactgcagaggcttctctgcttctgtgttctggaagagccacttgtagtatttttgaggcacctccgtactgttctccatagtggtatactagtttacatctccagcacagcatataagggttctgttttctctgcatccttgccagcatttgttacttttgtctttttgatgatagccattttaactgggggtgagatgatacctcattgttggttttgtttgcaattctgtgatgattaatgatgttgagcattttttcatacatttattggccatttatatgtcttttttgagaatgttcagattatttgcccattttcaattttaattgtttcaacctttaatatgaacattaatcgtattttcaaatctaatgacgaattacagatagagaatttatgaaaattatggggcacagcagtcagagaattaggcaaagaatacaaaaaactgtaacacatatgtaactcttcttgtaatgatgaacagagaaagaatagctcattttgtattctgaccacagtataaataaatgcaaaaatatacggcagttaagcgatagctgttaggtagaaagtattgatcacaggtggaatctgttacatgcgaggggggaaatatatcaagagatttagttaacaatgctggaaaaaccatgccaggcaaccagatcttgaggcaagagtcatacttcacagagaaaaagagcaaaatgtagagaaaaaccaggtctcgctatggaatggtctgtagtcttttaaccacagtgccatagaaggaacttgaccaagcactgcccatgatctgcagagttatgtgcataatactcagttttcctgctagggataccccagttcatgacaatgacaagagaatgagaaaggccacctacaaatgaaatgagatcatcccacctgcaatggcagatatggtcttattagtgccatctctcagaaagaacagtgtcctgggggaagcagatcagatattaggtcaagcctgtgttcttacaggagctcatttgcccattttgtaattggattttttttttttattttgcttttgagatgtttgagtttcttgtatattttggttattaagtctcctgtcagatgagtggtttcagaatattttctcccattctgtaggttgtcttttcactttattatttcctttgctgtgcagagctttttcattttatataatccagtttgtttatttttgcttgtgttgctttgaggtcttatttataaaatctttgtgtagaccaatgtcctgaagcatttctcctgtttacttatagtagttttatagttttgggtttacatttaggtttttgatttactttcagttgatttttgtatagagtgagaggtagaagtctagtttcattgttctgcatatggatatccagttttttcagcataatttattgaaaaaatggtccttttgccaatgaatgttcttggtacttttatcaaaaactaattggctatagatatgtgcattaatttctgggttgtctatactgttttagtggtctgtgtgtctgtttttatgccagtatcatgctgttttggttactattgctttgtagtatgttttgaggtgtagtagtatgagctttgctctttttgcccaagattgctttgagtatttgggatcttttctggttccatgccaattttaggatattcccccttatttctgttaagaatgtcattggtattttgttagggattgcatcgaatctgtagattgcttagggtagtatggccatttcaacaatattaatttttctgattcatgaacttggcctttctttccatttctttgggtcctcttcgatttcttttatcagtgttttgtagttttccttgtagagatctttcacctccttggttagatttattcttaggtatttttttttgtagcaattgtaaataggattgccttcttcatttttttggctcctccattgttcctgtatagaagtgatactgatttttgttcattaattttatatcatgcaagtttactgaattagtttatcagttctaagagtattttggtagagtctttaggtttttgtatatataagatcatgtcatctgcaaacagggacagtttggctttctgctttccagttttgatgcctcttatttatttttcttgcctgattgctctggctaggacatctagtgctatgttgaataagagtggagatccttgtcttgttccagttcttagaggaaaagctttcagttttttccccattccagaagatgctagctgtgggtttgttatatatggcctttgtatattgagatgctttttttctacacataatttattaagtgttttcatcatgaagggatgttgaatttcattaagagctttctctgagtctactgaggtgttacggtttttgtccttcattttattgatatgatgtatgatgtttgtttatttgcatgtgttgaattattcttatattcctgggatttatcccacttggttatggttatctttttgatatgttgttggctttggtttgctagtattttgtcgaggacttttgtgtctgtgttcatcagggatattggcatgtagttttcttttctgattgtgtctttatgtggttttgctatcaaggtaatgctggacttgtagaatgaattagtgagaattccctgcttcaacattttgaagtagtttgagaagacttggtattaattcttctttaaaagaatgatagaattctttggtgaagccattatttttggacttttctttgttgaaagaccttttattactgagttgtctcattacttgttattggtctgttcagattttctttcttcttagtttacttttggtatgttgtaggtgtccaggaatttatctgttctaggtttttaaatttattgacatatttcatagtaatcaccaatgagcctttgtatttccatggctcctgttgtgctgtctcatttttcacttctgattttatttggatcttctcttttttcttagtctagctaatggtttaccaattttatttattttcaaaaaaaacaacttttagttttgttgatcttttgtttttagtctcaattttgtttatttctgttctggtcattattatttctttacttctgctaactttttgttttggtttcttcttgcttttctagttccttgaggtgcaccattaggttatatgaaatctttctagtttttttaatttcagcatatatttccctgaagtttcctcttaatactgcttttgctgtgttccctagcttttgggatcttacgattctattttcatttcaagaaattttgaaattcattcttaatttcttcttccatccattggtcattcaggagcatgttgtttagtttccatgcatttatatagtttcagatgttccttttcttattgatatctagttttattccattttggtctgagaagatacttggtatgattttgatcttgttataaataaagtttcagtgtcgtaaaagaaatagtgcttgaatataaaattttctgttttttttcttctcagcgaggcaatttacttctatagaagggtgcaccctcacagatggagcaatggtgagcacacacctggacaagggaggggaaggggttctgattcctgacacatgtggcccctgctgcttgttattcctcctattagctagggttaggccgcacaggctaaactaattctgattggctaatttaaagagagtgacctggtgagtggtttggcaggaaaaatggttatggcagagcaggtaattggaatgagttagggtgcagcaggtaattggaatgagtcagggtggagcagataattggaatgagtcagggtggagcaggtaattggaaggagtcagggtggagcaggtgattgaaaaaggttgctttatgaggaagttaagtttaaaagtagaaggcaaagaattgaacatactgacatattgatactttgaagagaaatttagaactcatatctaacaatcttaaagttttttttgagacttgttttgtgtcctaacatatagttaatcctggagaatgttcaatgggctgatgaggagaatgtgtattctatagctgttgggtgaaatgttctacaaatatctgttacatccatttggtctgtggtgcagtttaaatctgatgtcccattgttggctttctgtcaagatgatctgtccattgctgagagtggagtgttgaagtccacagctattattgtgtttggatctatttcttcatttgggtctaatagtatttgttttatatgtctgggtgttctgatgttgggtgcatatatatttataattgttatattctcttgctaacttgattgctttattactgtgttgccttgtctctttttacagcttttaactacaggtctttttcgtccaatataagtatagctattcatgctcacttttggttttcttttgcatggaatatcttttttattccttcagttacagtttatgtgtgtctttataggtgaggtgagttgcttgtaggcagtatatcatagggtctttcttttttatccattcaacctatctatgtcttctaaatgtatatttaatccatttatattcaagattattattgatagggatttactcctattattttactgttttctgattgttttgtatattctttgtttcttacttcctcccattatttttacagttgagtggtgttttacattgataaggttttatttgtttttctctcttgtttgtgtatgagtcctaccaatgagttttattgttccgtatgttttatcgatggtggttatcatcttttttacttccagatataagactctcttgagtatttcttgcaagatcagtttagtggtgatgagttttcttagtttttcttgtctgtgaaagattttatttattcttcatttttaatgtgtaggtttgctgggtataatattcctcattgccatttttaatttttattttttctttcagtactttgaatatatcatcccactctctattggcctgtaagttttctcctgagaaatttactgttagtctagtggagtttcctttgtatgtgacttgacacttctctcttgctgcttttaaaattatttctttgtctttgacttttgaaaatttgatatataatatatgtctctcagtgaggacctgtttgggttgaatctgttggggttctttgagcttcctggttctggatgtccatatctctcccaatgcttaggggaattttcttctattatttcattaaacatgttttccccacctttcccttctcttctccttctggaacatctgtaatactttattcacatgatggtgtttcataaatcctgcaggctttcttcatttttataatttagtttttgtctgcctatgttatttcaaaagacctgtcttgaagtacagaaattcttttttttttaagattttatgtatttatgtatttatttatttatttatttatttattttagtatttattgatcattcttgggtgtttctcggagacggggatttggcagggtcgtaggacaatagtggagggaaggtcagcagataaacatgtgaacaagggtctctggttttcctaggcagaggaccctgcagccttctgcagtgtttgtgtccctgggtacttgagattagggagtggtgatgactcttaacgagcatgctgccttcaagcatctgtttaacaaagcacatcttggaccgcccttaatccatttaaccctgagtggacacagcacatgtttcagagagcacggggttgggggtaaggccatagattaacagcatcccaaggcagaagaatttttcttagtacagaacaaaatggagtctcccatgtctacttctttctacacagacacagcaacaatctgatttctctttcctttccccacacttcccccccttccactcaacaaaactgccatcgtcatcatggcctgttctcaatgagctgctgggtacacctcccagacagcgtggctgggcagaggtgcccccacctcccagatggggggggtaacagggggggggtggccccacctttcttccagatgggggggcttggcggggggggggttgcccctacctccctcctggacagggcggctggctggggctggggctgtcccccacctccctcctggaagggcagctggccgggttggggctgccccccacctccatcctggacggggcggctggccgggcgggggctgtcccccacctcctggagggggcggctgccgggtggagacgctcctcacttcccagatggggcggctgccgggcagaggggctcctcacttctcagacagggcggccgggcagagacactcctcacctcccagacggggtggtggtcgggcagagacactccttagttcccagacggggtcgcggccgggcagaggcgctccttacatctcagacggggcggcggggcagaggcgctccccacatctcagatgatggggggcggggtagaggcactccccacatctcagatgatgggcggccgggcagagacgctcctcacttcctagataggatggcggccgggaagaggcgctcctcacttcccagactgggcggccaggcagaggggctcctcacatcccagacgatgggtggccaggcagagacgctccttgcttcccagacggggtggcggctgggcagaggctgcaatctcggcactttgggaggccaaggcgggcggctgggaggtggaggttgtagcgagccgagatcacgtcactgcactccagcctgggcaacattgagcactgagtgagcaagactccgtctgcaatcccggtaccttgggaggctgaggctggcggatcactcacgtttaggagctggagaccagcccggctaacacggcgaaaccccatctccaccaaaaatatacgaaaaccagtcaggcgtggcggctggcgcctgcaatcccaggcactcggcaggctgaagcaggagaatcaggcagggaggttgtagtgagccaagatggcggcactatagtccagcctccgcttggcatcagagggagaccgtggagagagagggagagagagaccgtggggagagggagacggggagggggaggggagaaattctttcttctgcttagtctagtctgttctagaagctcttgattttatttttttagtcattgaattcttcagctgtaggatttttgtttggcttatctatcttttttgaatttcttattcaaatcatgcgttgatttccccaattttgttgaatcatcggtcttctcttgtatggcactgagtttccttaagattaacatttaattctttttctggcatttcacatattttcttatgattgagatctgttactggataatcgtttttctttgtaggtgacgtgttttcttgctttttcttggttgatatgtccctatattgatttgtatccatctagtggaaaagtcgcctcttccaattttatggtgtaggtttcttagggaaattcttatttgcatgagtcttggggtgttggtttggtggagtgtgttgacctagtttccatgtagttttttcagctgtaacccatagtagtggaatttgcatgtttctgagtggcctaggctgagagagtttgtggtgatgatggtacaggttttccaggggtgggcttgctggggctgtttctctgggtggggacatgtgtgtgcacacagtagatcagccaacttggggtatggtcagctggggttggggccatgagccattcctctggctttgaacataggtatacagttgcttggctggtcggtggacataccttccaggaatggcttgtggggctgtttcttaggcccaggatgcaggcacaccgctgcttagctgacctggggacatgtctgccagggttggcctgcagggccatttctcaggctctggatgtggacacaagacttcttgactgacctgtgggcttgtctatcaggtgacacgcacagggcctgtttctccagcttaggatacaaggctactcatctgatctggattttgcccaccatggacagcccatggagctatttctttggcctcgtatgtgggtgagtggctgctcagctttcctgggtgcatgtctgctggaggtggtttactgggtttctctggcttatgttgtggatgtgcacctgcttggctggcctgggtctgggtctgtcattggcaacctgtagggctgtttctgaggcctggtatgtgcaaggctgcttgcctggcctgggggaatatgtcaggagctggggggcagacttagagctgtttctcaagcctgtgacatggctgcagctgctcagctggcctgggggtgcttctgtagagggtggcccacagggctgtttcatagacctgagatgcagacacaggattgcttagttggcctgggagcatgcctgctagaagtggcccatagggctgtttcttgaggctgggatgtggaaatacaactgcccagcaggcctgggggtgtggtgtgtctgccaggggtggctcatgaggctgtttctcaggtctgggatgcaggtgtaaggctgctcagtcagctcaggggtgtgcttactgggtgtggcttgcagggctattttcacatccaagagttgagctctttgctgcctggctgacctgggggcacacctgtgagggcggcctgtgggacttttctcaagtccttattgggagcataggacctttgggtaggccaggggatgtctgtggtgggtgggaatgctgtggccatgtagccaggccactggcccagggaatattggctccttgtaggctcagggacctcttctgcttgggggagggtgggtaaggacatggctggctctcaagggcatgttcaccctgggtgggaatggaagactgttcttctggctgaaagtgtagcagcgggggttggtttccctgctgtgcagactggagtcacaggcaatcttgagccaagctttgtgcatctggggttatggcatttagcatctgtgggtgcttggcataatgaagatggagccccattggtggagaagtgcagtggctactgtacccaagaggagggagcattccagaggtggctctagtctcaagatggtgtcttgctgcaatagcttggctcacaaggggtgggttagcgcacgttgtgttcccaacctggagcagtgcagttgcatgaatttctggtggctctccaaactggactcagggggtgtaaggactgtaggcctttgcagtggatgtaggggatggtggggatcttctgcttacttctcccttacaatgggaagtacctcctgtctcgtgggcccagtctgatgctgtagggcgagacgtgctgcagaggtcagatgcctttacactgcattcctcaggaatcagtcaacacaggatgcatctcaactcccgctgtggcgattcaactgcctctcttcggcacttgagtcaatgnnnnnnnnnnnnnnnnnnnnnnnnnnnnnnnnnnnnnnnnnnnnnnnnnnnnnnnnnnnnnnnnnnnnnnnnnnnnnnnnnnnnnnnnnnnnnnnnnnnnnnnnnnnnnnnnnnnnnnnnnnnnnnnnnnnnnnnnnnnnnnnnnnnnnnnnnnnnnnnnnnnnnnnnnnnnnnnnnnnnnnnnnnnnnnnnnnnnnnnnnnnnnnntcccacttgtcaattgtttttgttgcagttgctttggagacttagccacagtttgtttttgccaaggccaatgccgagaaggtatttcctaggttttcttctaggattttattttcttttttttctgagactgagtctcactttgtcgcccaggctggagtgcagtggcgtgatctcagctcactgcaagctccgcctcccgggttcacgccattctcctgcctcagcctccagagtagctgggactacaggtgaccgccaccacacccggctaatttttttgtatttttagtagagacggggtttcaccgtgttagccaggatggtctcgatctcctgacctcgtgatccgcctgcctcggcctcccaaagtgctgggattacaggcctgagccactgtgcctggccgccttctaagatttttatagtttgaagtcttacatttaaatctttaatatatcttgagtaaatgtttatatatggtgaaaggtaagcatccagcttcattcttctgcatatggctaggctaaccattccagcaccatttattgaatagggagtcctttccccattgcttgtttttgtcagccttgttgaaggtcagacagttgtagctgatctttattctgagttttacagctttatttctgagttttctattctgttccattgatctatgtgtctgtttttgtaccagtaccatgctgttttgattactgtagcctaatagtatgaagtcagataatcaggtgcttctggctttgttctttttgcttaggattgctttgctatttgggctcctttttttaattccatatgaattttagaattattttttaaattctatgaacaatgacagtagtttgataggaatagtgttgaatctgtagatcgctttgggcagtatgaccattttaacaatattgattctttcggttcctgagcatggaatgtttgtgcatttatttgtgtcatctctgatttctttcagccgtattttgtagttctccttgtagaaatcttttacctccttggttagctatattcctaggtattttattttatttttttgtggctattgtaagtgggattgtgttcttgaattgactctcagcctggatgttattggtgtatagaaatgctgttgatttttgtacatcgattttgtatccttaaactttgataaagttggttatcggttccaagagccttttgacagagtctaggattttctaggtatagaattacattgtcacaatgatattgagaaattatacaataaagatttaaggagatttctagctcggatacttttttttttttagagtcaaggttttgctctgtcacccaggctggagggcagtggtgcaatcatagctcactgcagcctcaaacttctgggctcaaatgatcctcccatttcagtctcctgaatagctaggactacaggcatgtgccaccatgcccagctaatttttaaattttttttcatagagtcttgctgtgttgcccaggctggtaccatactcctgggctcaagtgatcccacctgcctcggcctcctaaaatgctgggattataggcatgggccactgtgcctggccttgggtaccattttcattaatctctactttactttggtggataaatattcctgccacttactaatgacacttaacatttcaaattttaatgagattatatggagaattgacattttcatcttttcggtaagaaaaaaggcttcttgtagctataaagacttcatttctgttagctctgggaactgatttgtgtttgaatattgtcacagaatttgaaatcagaatacttagtatacatttgtaaaatatagttctaaatacttaacactattacttttaaatgcctttgacagatttttcattatacttgcaacttaagttaatttttaaaagtaaattggaattttatttttattttatttatttatttatttatttttttttattgatcattcttgggtgtttcttgcagagggggatttggcagggtcacaggacaatagtggagggaaggtcagcagataaacaagtaaacaaaggtctctggttttcctaggcagaggaccctgcggccttccggccttccacagtgtttgtgtccctgagtacttgagattagggagtggtgatgactcttaacgagcatgctgtcttcaagcatctgtttaacaaagcacatcttgcaccgcccttaatccattcaaccctgagtggacacagcacatgtttcagagagcacagggttgggggtaaggtcacagatcaacaggatcccaaggcagaagaatttttcttagtacagaacaaaatgaaaagtctcccatgtctacctctttctacacagacacggcaaccatccgatttctcaatcttttcccacctttccccccttgctattccacaaaaccgccattgtcatcctggcccattctcaatgagctgttgggtacacctcccagacggggtggtggccgggcagaggggctcctcacttcccagtaggggcggctgggcagaggcgcccctcacctcccagacggggcggctggccgggccggggggctgactcccccacctccctctcagtaaattggaattttataatagttactatttgctcattaaccaccatgtcctaggtaccagaagtagatattatacattcattattttaactaatctcacagtagtcttgtgaaatattactacctccattttttagttgaggaagctaaacttaaagtggctgaatagaacacaggttatatgtgacagaatgtgtgttcagactctgttgatctgccttgagtattaagctatttggaactcactgagtgactaagtttagaaagaccactgagagtctagaccagtatattttgagagccatttacaaaatctgttgggttgtatggggcttgctctttactctactaggctactttaataagtgaataaatgaatgcaacatatttctgaggttttctatttttgaagacatgagcaatagaggtaacttttaactatagttctctggtcacctggaaagcgtttcattcatggggaattatataagagtttgctaaattagtaatagactgtgggctattggaaaaagaagcctcagggtttgaaggtttgtattgatatgtttttgcctactcctgggtcttgaagatagcctgtggtaggcaaaggagggttgtaatttgttttgtgattttgtttacatatttgaaaccaaattttttagggggtcaaaatgatgtagataacttaagtctctcatggcctttgatgagtggcccacaggcaactcaaactggtatgtatcttttccttgtgttcccaagtcttgcctgttcactgccatttcctagtgtacctttttctggatatattattggctttgtagagatgataatggaccagggtctatttctagctctgttttagatgatttatgacagtgagcatgactttctgatgccttaagttatcctctgcaacatagctattttttcatgtaaattttaggtagatgaatgaactaataacctttgagctacgactaggaagatcatatctgtgccatggttggtgttcattccaatttttctcttacatttatttcagtgctactgttaggactcaaaaaagaacatgtatctttgtattaatctttaatccttcttgcagttttgtttaatattaaatatcataaattagcaaacagtttaaaagcacatgttaacagcatgtacatctagatgaatgttgtacctacaacaggcacttgggcagattatataattattttaataatattgggcttttataaaaaatatttggaatttccctcagagtaagcttacaaactgtcaaaggataaaaatttgctaccacgttgaaaataacatttggaagttttgggattacaatggagtattgaatatctgcatttaattttgcttctctctgaaacactacaaaaaagaagatacagagattataaaatgtcatatacccataaggacaaggaaattggcaaggcattgaaagagtggaaactgtcacttagtagagctgagacagccgaatcccaaggtggtagcaggaatagctgagaactaaccttgtttacacaacatatcctcaaaaggcataatgacttttagcaccagatacctttggaactgaggatgaatatatttttaagtggttctcctttacttcatctcatttgatggccactcttgtctcctcctggtagaagttttgaggtttgttttcaatggggggttaaaatagagcatctctggattgggagatttcatgcacagttgaggaaaagggttccatattaaaactgggtggggggcagttaagtgacagtatgcctactgagtattgaagactgacagccttcatcctgtactcggctctcaaaatcctggcagccagtcctttcccctttcaagtaggagactagaagacttttgtgtgggcaatccatgacaaggggaaggccttaaagatgctaactgtgccagttgtttattgcctctgagttccagacccacccttacaaccccttgttatgatgctgaagttggacttgcaaactatattttttctttgtcagctgaatctatgttagtcactgccaataaaggagtgtagtagggagattactaggaataagaagggttgtggttcttcatgtttttttttttaatcacagtggcagactgctctgcaagtagttgatacccacagtatttcccatggcaagcagtggtctttgttctgatgcatgaccttcagcaacattctttctcactgagcagtcagtggatagcatatttctgcagtagtccaacatttccttatagatctgtattcttagccttttggggccccttttgtaagttgctaagccttttttttttccttgtttacttttccctcagccttaaatgtggcagctgcgttctgtagttgctacctctgttatatcttagagctgtcttccattttcagttgtttaccatctttttacctatttaatgttctttatagtaaatttttcctgtttgaatgattggtatattttctgtctcctgactttaccccacttgatactcttgaagtctgggtctccacaacaaatgatacggtgagatctctgtgcagtgaaccataaggtcagcaagcttcacccatctatttggagcttccagttaactttttatttcctttcccttaaatatgaactggcaaccaaggatacaagatatttgaagatgcctctaacatgaaagatggccacatttcactatctcccattctactccccaaaatgaaaaatcactttgtaggaaacagactgcacagggtgaagaaagattaccattaatatcctctgagagataaaggagatattgcatctgtgaaacaggaactggatactgtagaaaaagaaacagtcagataccacaaaagagctcttggaaattaaaaatatgatagcaagaatgaaaatctcagtaggagggttggaagaaaaagttgagggaatttgctagaaaataaagtaaaaagacaaagtcgttgaaaattagagaagatacaattagggatcagcttcaagaggtgcattatttggtggggattcagaagcacataagagagaaactgaagtataaaaattcactgtgaagtaatttgggaaaattttccagaatgtaaggagacgggcttccagattgaaagggcccaggaagaaactaacactaataaatgaaaatagactaatttcattgtgaaatttcagaatattggaccaagaagatttaacaagcattcaactacaggaaaaagcatgccatgtaaaaaggaccaggaatcagactgacattggattttaaccatggagactagaagagtagaggagggtcttcaaaatgccgaaggaaaatgtgtgttatatgttatcttagttcatttaggctgctataacaatactataggctgggtagtttataagcaacagaaatttatttctcacagttctgggctgggaagtgcaagaacaaggtgccaaacagatttaatgcctagtaagagcatatttcatggttcatagatggctgtctttttggtgtgtcctcacatagaggaagggagcaagcgagatctctggggtctcttttataagggcattaatcctgtttataagggccctgtcctcatgatccagtcaccttttcaaaggcttgacatctggatacgcttatattggggattaggtttcaacatatgaatttgcaggaggaagacaaaacattctgtctgtagcatatataaatattagaatggtgcaaaagtaattgtggttttgccattggaagtaatggcaaaaaccccaattacttttgcatcaacctatagcttgtggtttgggagtttatttttgtttaaactgacaatctggattatttagtccatttgcactttgatatagttaggtgtaggtgtatcatcttggtccttgttttctttttgttccttagtttctcaacttatcctttcttattttccttgaattaacccagcattttaatgatttcatttaggctcctctattagcttgttggttttacagtgttttgcttttcccttagtgattatcctagagtttgaaacatgcactcttttttttttttttgagatggagtcttgctctgtcccctaggctggagtgcagtggtgcgatctcggctcactgcagcttctgcctccatggcctcagcttcctgaatagctgggactacagttgtgcgccaccatgcctggctaatttttgtatttttagcagagacaaggtttcatcatattggccaggctggcctcgaactccggacctcaattgatccacccacctcggcctcccaaagtgctgggattacaggtgtgagccaccacacgtgccagaaaacatgcactcttattagagtctaccttaaatttgttcttttaccactccccagatcgcatgaactttacaatgatttaactacatttgtccctcttgtcttttatgcaactatggtctatattttacttctgtctacattcattcgtttgcccacattttttacccttttcttttcttttttctttttttgagacaaagtctcactatgtcacccagactggagtacagtggcatgatcttggctcactgcaaactctgcctcctgggttcaagaaattctcatgcctcagcctcctgagtagctgggattacaggtacccaccaccacgcccagctaattttcatatttttagtagagatggggtttcaccacgttgtccaggctggtctcaaactcctgacctcaggtgatctgcccgccttggccccccaaagtgctgggattacaggtgtgagccatggcgcccaaccttttacccttttcttttattttttattgagacggagtctcactctgtcgcccaggctggagtgcaatggtgccatctcggcttactgcaacctctgcctcctggattaaagtgattctcctgcctcagcctcctgagtaggtgggattacaggcatgtgccaccatgcccagctaatttttgtatttttagtagagacggggtttcaccatgttggtcagactggtctcgaactcctctccttgtgatctgtctgccttggcctcctagagtgctgggattacaggtgtgagccaccgcgcctggacccttttacccttttcaattatctctttaccatgcttttacatggttctatctgggatttatttatttatttatttatttgccatttagatacatcttttagtagtatttctttcagcgctggtttgctgcgcattgtttcagtttctgcttatatgaatctcttaaatttgtcatcatttttgaatgatatttttcctcagtatagaattttaggttcatgggtgttttcttttagcattttaaaggtttcatttagttaatatttgacttgcataatttctttgaaaagtcactgtgttattgatttctcctaaatgtaatgtggctctgctcagcttgtcagcctctcagctgctgctttttgtggggtttcttggaatcctgtatgccattttgggaactgggaaatctcaggagtggagattaatataaaattttggatttactgtaattcacttctttctgagatttttatccctaaggctcagttgctttggtagccctcaatgtcaacatttttctcttatttcaatggaactatcattttctgctggtatgccctcagaaaaaaaaagtcaggtgaatgaggagctcaccttgatgtggttttccttctcttggagattatagtgtctgaagttctgtcgaggatagttgctttctaatgcccttacacagctgtttcatgtattttgtccaaagcaaagtttttgtcaggactagaaccagaagttcacaaatatatagtattttaattccaaaagagtttaaaaatatcttgatcagtggcagtattattgaaattcgcttatggccctccagagtgactaattttaatgaaataatgactcatttgcaagtaaaaattctcagttttttaatgtacatttatttattggtgattattatctttaaatttacagctcacaaatgaagatttaatataactaaactgtgcaaataaatgcagatgattattgtgtaaatttttcagtgcaaataatggaaagaggattttgaatgtagaccttttgaataattacatttttctgttttgaggctgaattatcttataagtttcttatttttacaagtgattggcacattgtttcctgcctattattagttatataactggaaaaggtatccataattgggtgaactccatatatttttattgatgcaccaaagtgaaaaaaatcagtatttttaaaagggtgtagattttgtttttggctcttgaatttacaattggttgcttaaatgatgtctaaagtgggtcctcatgcaagtcttcacaaagaaccatgatttgttattaaactacttttaatcatggtatggaatggaagagaaattgtgcttatcttctacctgtctctacttcctgtgcagctattagccaggtattgggtataaataaattttcattttttccattcatcggtgaggaatatatgttacacctttggaataaaaaactttcacctttgaaacttcttatcaaaggggtatttttttgttggactgcatttgatgcttttgatctggtttgattggtttgcacctggaatctttgtaaagggttgctgattgttgactgtcacatggcctgatctgtatagaggcttcattcttttgggttcacactgccgacactgttctgcagcttctctgtcagtaccaattgtagtggtactgttggctctttgggatagtataacttcacttgcattgggtgactggcaaggacatttcacagtctaaataagaatgcgtattatttttatttttttaaagtgaaagcaagtttattaggaaaatagaggaatgaaagaatggctactccacaggcagagcagccctcctggttggctatttttatggttatttcttgattatatgctaaacaaggggtagattattcaagagttttctaggaaaggggtgggcaattcctggaactgagggttcctcccctttttaaaccatatagcataacttcctgacattgccatgacatttgtacactgtcatggcactggtgggcatgtcttttagcatactaatgaattataattagcatataatgagcaatgaggacaaccagaggtcattttcattgccatcttggttttggtgggttttggctggcttctttactgcaacctgttttatttatttatttatttatttatttaattatttatttatttttaattttttttattttttaaaattatactttaaattctgggatacatgtgcagaattattacgtaggtatacatgtgccatagtggtttgctgcacccatcaacccgtcatctacattaggtatttttcctaatgctatcccttccctagtcccccaccctctgacatgccctggtgtgtgatgttcccctccctatgtccatgtgttctcattgttcatctgccacttgtgagtgagaacatgtggtgtttggtttttctgtttctgtgttagtttgctgagaataatggtttccagcttcatctgtgtccctgcaaagggtgtgaactcatccttttatagggctgcatagtattccatgttgtatatgtactacattttctttatccagtttatcattgatgggcatttgggttggttccaagtctttgctattgtgaatagtgctgcaataaacatatgtgtgcatgcatctttatagcagaatgatttataatcctttgggtatatactcagtaatgggattgctaggtcaaatggtatttccggttctagatctttgaggaattaccacactgtcttctacaatggtcagactaatttatactcccaccaacagtgtaaaagcattcctatttctccacatcctctctagcatctgttgttccctgactttttaatgattgccattctaactggtgtgacatggtatctcattgtggttttgatttgcatttctctaatgaccagtgttgatgagctttttttcatatgtttgttggccacataaatgtcttcttttgagaagtgtctgttcatatcctttgcccactttttgatgagattgtttcaacaaacctgacaaaaacaagtaatggggaaaggattccctatttaataaatggtgttgggaaaactggctagccatatgcagaaagtagaaactggaccccttctttacaccttatacaaaaattagctcaagacggattaaagacttaaacgtaagaactaaaaccataaaaatcctagaagaaaacctaggtagtaccattcaggacatagacatgggcaaagacttcatgactaaaacaccaaaagcaatggcaacaaaagcgaaaattgacaaatgggatctaattaaactaaagagcttctgtacagcaaaagaaactatcatcagagtgaacaggcagcctgcagaataggagaaaatttttgcaatctattcatctgacaaaggtctaatatccagaatctacaaggagcttaaacaaatttagaagaaaagtgcaacctgttttattagcaaggtctttgtgacctgtatcttgtgctgacttcttgtctcatcctgtgacttagaattcctaaactcctgggaatgcagcccagtaggtctcagccttattttacctagcccctattcaagatggagttgcttttattcaaacgcctctgacatatttttcttctcccttttacaagggaactcttaatcctaaggttagtagagggatgaagatctagcttctgaaacttcttcaggctgaataggggtggtgatattcctgcctaactatcagggtctcttgtattcaggtttgagaggagctcagtcagaaagcattggtttgtcgagggccgttcatagctctgagtttcaacaaaggtgatatctggaagattaataagtcttcaatttaagaaaacatttagtaagcttatcctgcattcctatacaaggagtataacagcaatatattccaccacagtaaagcaaagtaagtaaaattatcccaagtaaactaaataagaaagcttttcatgaactgggcagttgttggaaccaagctgatatggggctgctagctgatcccaatatgtgcccagaattagaatattgatacagagttttgcattactcatccctctgtttcttctgagcagcagtcagagatcactggttggttcacaggataagcagggttaatctaaaatgcagataaaacttcgaaacaactgatgagagtagaatctaataacaggcataccatagttcttgaaacatatttttttctctttagtcttccatttttactaaagacaaatcataataggaccaatttgtttgcaaaaataaaccttactcttattcttggcctgattatttgtttaaagtacagcaagaataattatttttcacataggctttttaaataggctttgatggaactgtgttccataaggaatctcagataaaactttttttaaaagccaagcccagccatgggtttgtaccctcaaatacctatgaattgggtaaactcatctcctcttggggtctcaagactatttgaggcccctgggctttcaggaattgacattctttacctaccacaggtctggaatcttgtacagggactgtgtagacaagatatgaggtcagttttcccatgaggcttttattgctctacacgtcaagtttgattccttaaaggaaagcacaccattccagtcaaaaccttggtaaaataaccaatttctccaattgtgtcctgttgcaaaagagaacattcttactgcacttatgcaaataactatattgccataaattaagaatactcaaatagtttccaaattctggagaaatcaggtagagagagacaaatatgcttcaaatttttttcacaggagtatacttcacttaattgttaaaagctgtaagtagctcaaaagaaaagttttcttgactctgtaaaacaaaacaagggatcagcaacattttaagcaaagtcaaaaagattactttgaacttttattagtttaatccatgcagttaactcctcttctgcttgatattcatgaacatttcagctctccaggagagtcctgaaagtttttcctgcattctgatgtcacaatctccaaacttaccagaaacctgcattcaagagcacctgtcaaagttctatagctgattttaaaccttgaagaggttttttcaagggatcaaaacaagaaaataattgtttttgaagaggatctcaacaagaaaacaattgtttgtggatgaccaaattgtttagggaagcccctattaaagccacaattgtctattaattttagttacttctgtggcatacaacaattttacataacaagttctattattaataacacacactaaatcatatcagaattataggagtttttcataattttagaacacataccaataatatttacacaaatacagcccaaagaaagccaaacaccatttcatatttgacagtgcttcccgtatgatttgtataccaaataagctgaatatgtcatttttggaccttaggtgacctaatagctaaaatattaattaagtcagagaaagtcatactttataatttgattttggaaagtttgtcaaatatcaaagtttttagacacttcatattagaaaatagagttccatgtcactataagtcattcatttagccaaaatggtaactcaaacatttaaaaaaggcaaaaactaagagggaagacttagctttccaaagtgtcttttttctttcccttctttttcctgtggttattcaaaaggggcaaacaaaaatccttctttttattaaatgtaacatgaaaatcttgttcaagacagaaagccatatttcattattgcattagtgtactattaatgtcacacccaattcttaaaaccttatagacaattcaattcagtcttaatcactttgcccataaggtagattctcataaaccttttttataaccatttaaaatttttgttacagaaggcagattagtgctctgagaaaaccctgttgtacttttattccattgttcacacacagactttttttacaagattaatttttcacaaatgtttcacaacttgcacaaaccttcagctatatcctgtctaacttaaaacaattatttaaccctttaatctaggcaaaatcacctcacattcacatgcctttttatgatcttttaccaaatcacctgtcactttctttacacaccttgcatgcaaaactgtttttatttcccaaagattacttaagtcacatgaactaaaaggcattgcactttttacttttctgacaaaatatttgatataagtgcttattacctttaaaccaattaattaaaatcacagtcttcaaacttatcagaaacttccattcgagagcacctgtcaaagttatatagctgactataaaccatcttttgaagaggatcaaaacaagacaacaattgttcatggatgacaaaattccttagggcagcctgtattaaagcctcatatcctacatagaacacatataaatacacagacagaagaagaaccagtacttgtaagattttttattagccagtttttaggtttctctttaaagtatgcagtttttagggcctaataagcaggcacaactggaaggcaaaacagattaacaaaacccaaaattaagggttccatttttgtagcagattctggatcttcaaaagggaaaccttatggaacaagacagtgcaatgattttactgtgcatttcattgcaaagcaacccaaagccaatcagctcattctgtgattagccaaaccccatgagatcttatctctcagtggtgggagaggaatatcttcattccttccaggtggcccaagagcttgcttctcttatccaaacatgcaaagagccaagtatccccccataactgccaatagccattgctaaaaatatatttcctaccaaagtatattttgtttattacacaccaaaattctctcataatgtgaatttctgatacacccaaaagtaaaaaaatcagataaaacaatgcaaaacagaaaagagccttatattttgagagggatctattacttctaattcctggggatcccattctggaggacggtggctgtcttctgacagctccactaagcagtgccccgggggggactccatgtgggggctcttacccaacctttcccttctgcactgccctagcagaggttctccatgagggctctgcccctgcagcagacttctgcctggacacccaggcattttcgtacatcctctgaaatctaggcggaggttcctaaacctcaattcttgtcttctgtgtagggccaataccatgtagaagctgccaaggcatggagcttccaccctctgaagcagcagcctgagctgtacctttcaccctctgaagcaacagcctgaagtatacctttagccatggctggagctgaagaagctgggacacagggcaccaagtccttaggctgcacacagcagtggggccctggaccttgcccaggaaaccatttttccctcctaggcgtctgggcctgtgatgagaggggctgccacgaaggtctctgacatgccccagagacactttcctcattgtcttggtgattaacatctggctcctcattacttatgcaaatttctgcagcaggcttgaatttctccccagaaaatgggtttttgttttctaccacattgtcaggctgcagattttccaaacttttatgctatgtcacctcttgaaaatgctttgctctttagaaatgtcttccgccagataccctaaatcatctctttcaagttcaaagtttcacagctctctagggcaggggcaaaatgccaccagtctctttgctaaactatagcaagagtcacctttattccaattcccaacaagttccccttctccatctgagaccacctcagcctggacttcattgtcaatatcactatcagcattttggtcaaaatcatttaacaagtctctaggaagttccaaactttcccacatctttctgtcttctgagccctcagtctctaggaagttccagacttttccacattttcctgtcttcttctgagcccttcaaactgtttcagcctctgcctgttatccagttccaaagttgcttccacatttttgggtatccttatagcagcaccctacactctgcagtaccaatttagtgtattagtctgttctcatgctgctatgaagaaatacccaagactgggtaatttataaagaaaagagatttaattgactcacagttctgcatgactggggaggcctcaggaaacttacagtcatggtggaaggggaagcaaacacgtccttcttcacatggtggcagatgagagaagtgctgaacaaaggggagaaagctccttataaaaccttcagatcttgtgggaactcactattatgagaacagcatgggggtaaccgcccccagattcagttacctcccactgggtccctccctcagcatgtggggattagaattgagattacaattcaagatgagatttagatggggacagagagccaggccatattagtggggaagtgggtgcgggaaaacttctctcttctgtgtatttatataggatgattggagatggcctttctgagaagataacatttgggcagagaacagatggatatgaggaagcaatcctgagatactctgggtggaaggggtttggggaggggaagaacagtccagaaatatggtgcaaaaagtataaaggtgctgaggcgggagcctgcttagtaagttgaaggaattgcagagagactattatggctgcagtggatggatgggatggggagaagcagagagagtggtggaagttgagatcagcagaggctctaataaagactttgaattttattttgatctgggatgcttttggagagcttagagcagaggagtaactaaggctcaaaaagttaaacttttcttttggaatttgaagttaatacccaaaccatttccaataattctttcatttccattcatttgggtaaagtggaaaaagtctgtgtttcttgcaatcatgccctgagtaacatgtccctagcttagaagttggagagttgcagcaagttactgaggaagggaagagctggtttttataggtagaagggatagaagaccaatagagaacttttggaggcaatacaacagcattttatagaattcagttatatttttctgacttaagttaaagttagacgtaagtctttataaacttgagtgttgtaagaatgccttcctttctttaattttctacaaaaatttatatctgaaaatattagagtataaaactttgccttaaccttaagttcctagtagtaatcaaaccagcagatgttttactcaccaaatgagactctgatgtgttcttcagttaaatgcatatgatgacattgaaattgatgaacactcaatctgaacatcaaggggagtttcactttctttgctagtattctgaaattttgtaaagtcaagatattaatgatgaaactgaaaggggagaatataattgcagaggtagattttccagagttcttggacagtaggtaaattgacatttggaagatacttcagtgtactggttcattaaaagcatatatttcctgttgattcataatgatttgggagatattttagttgtttctttgagagcttatgaacttttttggttcatatgtaagaaacaaaaataatgggttgttcttccctttctcttttccttactgtcttcaattcttcttagtcatggaacggatacatttggcaaagcttgtagcagagttgcagttttaagaaaaggtgatggctgaagttcactgagcagaattctcatgtgcacctgataatggtggcctcccttagagatgataatgtggttttgaaactacttagatcagtgattgtcagggctggggcaagaggttggggaggagggttgactacaagagagcatggtgtcacatttgcattatcattatatggtgttaaatgtatccacagtatgcatttaagattccttcagtgtcttctcatggcttgttagctcatttctttttgtctctgaataacattccattgattggatgtgccacagttttattcactcatctgctgaagagtgacatcttagatgcttttgagttttggcagaaagtatgataaagctgctgtaaacatcaatttgtagtttttttgtgtggatgtaagttttcaactcatttgggtaaatataaggaatggattactcaatcgtatggtaacaatatgtttagttttgttagaaactgccaaactgtcttccagagtgcctttgtaccattttggatttccatcaagagtgaatgagagttccttttgctttacatcttcatcagcatttggttcgggacagtgttctggattttggccattgtgataaggcatgcagtagtatctcattgttgttttaatttgcagttgcttaatcacataatgatgttgagcagcttctcatattcttatttgtcatctctgtatcttctttggtgaagtgtctgtttagatgttttgcatattttttaattgggctgttttctcccctcccctcccctcccctcctctcccctcccctcccctcccctcccctcctctcccctcccctcctctctcctctcctcttctttttttgagatggagtatcactctgttgcccaggctggagtgcagtggcaccatctcagctcactgcaacctctgcctcctgggttcaagcaattctcctgcctcagcctcctgagtagctgggattacaggtgtgcgccaccatgcctggctaatttttgtatttttagtagagatggggtttcaccatgttggtcaggctagtctcaaactcgtgacctcatgatccacccacctcagcctcccaaagtgctgggattacaggtgtgagccactgtgcctggccgggctgtttattttcttattgagttttaagagttctttgtatattttggataacattcctttatcagatatgtcttttgtaagtattttctcccagtttgtggcttgtcattttgttctcttaacaatgcctttcacagaggagtttttaattttaatgaagctctgtgtatcaattatttctttcatggatcatgcttttggtgttgtagttaaaaagtcattgctgtactcaaggttacttagattttctcctgtgttgttggagttttatagttttgcattttatgttaaggtctacgatccattttgagtttatttttgtgactagagtaagatctatatgtagattcattttctttgcatatggatgtccagttgttccagcaccatttgttgaaaacttttttttccattttattgcttttgctcccttgtcaaagatcagttgattgtatttatgtgggtctatttctggattctctattcagttctctgtttgcctaatctttcaccaatatcatactgtcttgattactttagcttcatagtgttctcattgcttttatggaggagaggctctttgaagagacttactctgccacacctcatgatgtcattttctgttacgtttcttaaaatactgtaaagtgtcacattggtaagttatcaccatttttcaaaaataaatggagaaatgagactcaagatataaaatgagttaatgaaatttattttttcagctattgttctaagtaggagcaaggctcatctcttttgttgtttgttatgttttcaggtgaaaaaagttgattcttttttttcatagctttgttattttaaaagttaatacgtaggacaaactctcaacgataacctctcaattaatttagctatcatcagcaatctcttctttatcttccttctttaaatacaactcttggcttcctctcctacccattggagctgcttccttttaaacccaaataaagaaactatagcaaacctctgaaaataatatattgaaattgagaagagttggcagtaaaattttcttttttctgaaaattgttttttgttgtgtaattgaaacttttattagtattgctgaatgtgaatgctgaaaggaaataaatcaagaaggtgatctgcactagcaaggatgttgactttagcagctggaaggcaaagaaatgagagtagtgtagtatactgtatgggagattgaatgagactgtgaaacagaaagtctgggctgtactccctatctgccatgaaaaaagtgatacaattttagcatttctctgccccaacacctttatgtaggaatttttgtgctgttgaattacatgtcctctgaagtcttttctaattgcattttactcagttgaaagggctttatgccttgtaatgaaaattagaaatgttttattcaccatatgactgttccttttggagtaagctgctatgacaactctagatcctaataaagccacagtgggtgttttaaggaaagatgtgcatttatctatttttttcaaaaaatactattgtgtctcttattgaacatgacattgtgattttaatattctcttatgctttgttttaggttggtacagaggagtttcaacaaagaagccaaatgtgaaggtaatgaaaagtttattgttaccttttctaatgtaggaaggaactaccttgtatgtttgtttgatataacaactcttagtggttcatcttttaatcttttacagtagccacaatgattctttcctttacaaaactgtagcaaactcttgtctgtctcagcatattaaagtgtttcttctgaaaggacaggaaatgcaaatatcatagctgcaaagcttatcttgaaaaagcctattcaggcttttaaatatttttttctttaaggtatttgacaaaaagtacattgacttattcacaggcctagtcctgtggaaccatataattagatgaattgtttctaaaagcacaatggaaaatattttcaaataatccaattagatatttctctaatcataatttattgaaatatgaatttaaacaagttgttagtgtagaatactaattttatgtactagattttatgtttattacaattaatattaatgaaacatagtttaattagcagttataatacagttagaaataatctttcccaataatgtatttgcaaacacttctttctgcatattttttcatgtaattaatattatcagcttttcttgtatgtttctgtagcttaatatttgatgcagtatgtttttgtttgtatagaaaaataccaaaattatcacttttttcattcaaaaagaaaattgtttagagttctaataatcagttttgccagtagaatcattcagttttattagttttaaggtaatgattataaggaaacagtatctttacattttaatgcctcctagctgtggtttctcattcttggcactgttggcattttgggccagataattctttattgtgggagacagtcttgtgcaatgtgagatgtttagcagagtatatggcttctacctactagatgccagcaaccctctgtcccttagtgtgacaacaaaagaggacttcagacattgctgaatttgtcttggggacaaaatgacccctggttgagaaccactgcttataggtaatttttcttatatttctgattttgaaatacattcatgaatgcttacgtgggaatagtttctacttgtggtttattttttaaattttgatttaaaattgttgaaaagttagaactggaataaatgaggaatcttataaatgaatagttgtaatttgtgatattgcgtgctatttatttattttagtagtatttgtggtcttggccacctcccactatcttatttccaatactagtgtttgaggatcagcgcgtggactgtgctcattaaaattattgtatgtttgtggttaaagtatgaaattgatgcaaagtttgtggcttgaaaacattattgagacaggaatgatggtacccttaaaatattaaacatcactgttttgattatatcttcctacacaatgaagtactccaaatttgtggattaaactaataaacattttatctcttatgcttttgtgacttgactgggtcagctgggtagccagttattctgggatgtgtgaggttacctgtggcaacagtcagctgtggggtcagtgtccaagacattctggtaggaatgtccaagagagtttacttgtatgtctggcatcttggcagggttggctggaagactgtcttcagctaggccaccaagataaccagacttctctatgtagtctcggggtttctctatttccatgtggcttcacatggtttatccagcaagtaattagagttttattttagagttaaggaaaagtacctggaacctcatacttagttcttaattctctttcctacaaaaaacagtttttggattctgtgggagaggccattttgtgattactcttagcagtgttttgacaagctgtacaaaatgaggaacctaactcacactactctaaagaatgttagagctcattttatctcatcagactcctttaatttcattattttgggggctaatgtggtattcagagattgtatattttggtaatatctctattctagaatcttaggttattacagcatttattagcaacatgtatctatatatctcttaatagcttgtatctgtattcttaaacttaaaaaaatatggaaagacagtattactaactgaatttcatcctgcgtcagtgatattttatggaaccagttatttagtgtttgtaaaatataatcatttagggataccacatccttaaaatgatacaaaaataaatgcgtttctatatatcctttatttgtgctaatattatggtcctactacacttgatcttagccaaaaggctaagaagtgatcttatttcagtcataataagtaaaattttctataggtttttcatagatattagtggttaaaggaaaaaataaagatgacttattaaagtttgtctttagtcgtttatgatttatactaataagtaaaacacagaatagctcaaataatatctgaactagacagtgaatatagttatttatttatttatttgtgagtgaatgaacgagattgagtctcactctgtcatccaggctggagtccagtggcatgattatagctcactatagtctcgaactcgtgagcttaggctaccgtcctccctcagcctcctgagtagctgggactacaggtgcatagcaccacacctggctaattttttttttccactttttgtagagatggggtatctctatgttgcccaggcgggtctcgaactctggagctcaatcgatgcttctgcctcagcctcccaaagtgctgggattacagacatgagccaccgtgcctggccagcacttagatatataagtaaacgatgaaacagttcttcctataaaagtttttcaaaattggcaaagcttaatctttttgttccctgtattattttgtagtaaaacatttagaaggagaaactggggtgattataaaataccctttctgttatgactacatactaaaattttgcagtttaagagaagcatgataggcaggaagtataactaaattttatgctagatgattttcagaatgatactttattgtcttttcattttttgaggactttgttttttctgcatacacttctacagtagaacttactttagttttataattttagagaccaaagcaaggttttgagacatagtgttctgttccattgccaaaatgccatgttatgtatttgttagagtcatcaaaatattaactttctggccaggcacggtagctcttgcctataatcccagcactttgggaggcccaggcaggtggctcacttgaggccaggagttcgagatcagcctggccaacatggagaaatgctctctctactaaaagtacaaaaattagcctggcttggtggtgcactcctgtgatcctggctactcgggaggctgaggcaggagaatcgcttgaactcgggagatgggggttgcagtgagccgagatctcgtggacaacaaagggagactctgtctcaaaaaaaaccaaccaaacaaaaaaacttaagagcatacatgaagaattaaagaataagacataaaattgagaaaaaaggacaacagatacttgattttatttttgtgctttttataaaatatatgctcaagaggaataatgaaattcagtacagtttatatttacttccattttgtgatttcaggatcagcttttatcaataattgtgaacagaatgcgtagtattctgtgagataggaacagggccttatggaatgttttgcacagcaaaaaattgcaagacatattcatggaatagtaaatattttaagctgggtaaggcatagtgcaggagagagtgatggatggtaaggcaggaaaggcagattggacctatatatttagagtcatacgccaaagaaatctaaggaatttacactttggcaacagggaatctgtcattcaacagagatgtggacccattactgtcatacagtataactataaaatagggtttatcaggaaaacaaaaggtaaatattgaagatatttactgtcaagagaatcgcttgaacttgggaggcagaggttcaagcgattgaacctccttgaatatttaaggtaaatattgaagtatttgtggataatttctgaaattttctctaaaaatactataatgggtaaaatgtatgtagattgatgagtcaagattggcaaaatgttgataattgttgaagctgagtgatggatttgtggagattcattatactgttgtctaattttgtctgtatttgaaatgggttattacttatctcatggaattgtaatgaggaatcaatgagttgatatgaaaccgttattgcagtgcctagcacataagaacgtgataattcttttgcactatcgtcttttactattaaagaatagcactgcaaatgagactgtaaagactgccaacactttggaggacagagaaagaggaactggcaaaaaaagactaatggagnnnnnnnnnnnnnnnnnnnnnnnnnnnnnnnnnnnnnnnnnnnnnnnnnnnnnnnnnnnnnnnnnnnnnnnnnnnnnnnnnnnnnnnnnnnnnnnnnnnnnnnnnnnnnnnnnnnnnnnnnnnnnnnnnnnnnnnnnnnnnnnnnnnnnnnnnnnnnnnnnnnnnnnnnnnnnnnnnnnnnnnnnnnnnnnnnnnnnnnnnnnnnnnagctgtagccagaagggaatcaacaattccagtggttggaaggtgagttcccacaagcctcaccactgtgaacatgctctggggtcctaaataatcttgaaaggcagtccagggcacaagtactgaaactcctatgtgagtgctgaactgggcccagagccagtggactggagaggtgcatgacacctaatgggacaagagccaaagcaactaagggagtgctgacatcacccctcccctagccccaggctgcacagcttgcaactccaaaagacccctcccttctgcttaaggaaaggaaagagtgggaagactttgttttgcatactggataacagctcaaccacagcaagacagggcaccagtcaatcacaaggtcccctttccaggtcctaactctcagaccttactaacctactaaactaaacatacccaggccagaagaaaacccgcagccttgaagggaaggacccactccaaaataaattgatcacctgctaactgaaaagccctcgggccacgaataaacaccagtgatacccaggtactatgtcaagggccttgggtgagaatctgagacctgctgccttcaggtgagacacagaacattcccagctctggttgctacagggcaagacttccgcttgagaaaagtggaggggaaaagtaaaaggggctttctcttgcaccttaggaaccagcttggtcaccggtcagtagggaacaaagcagcctctaggggccctcgattccaggacttggctcttggatggcatttctggagctgtcctgggtcagagaggaggccactgccctgaagggtgagtcccaggcaaggcaagattcactgcacgctgactctggagcccttaagacttaagggaacatcaacagtagtctggcagtactccctgtgggcctgtgggcctgtggcagcagtggctacagggtgaggtttctctgcctttggaaaagggagggaaaagggggaaggatgttgtcttgtggtttcagtaacagctcaactacatagcacaatagaacaccaagtagacttctaaagttttttactagttcctggctcctggacatcacctctggacccacctggggactaaggaaacttggcatcctgaagggaaggacacaggcctggctggctttgccacctgctgactgtagagcaccagggccttgagcaaacatacacagtagccagggagtggttatagtagtccttgggtgacattcagtgccatgaagcttcaggtctgacccagcacagacctagtgaccacagaggtgcttgtgtcactccatccccagctacagatggctcaaaacacagagagggagattttgcttgtttgggagaaagtaaggaaaaagaacaagagtctctgcctggtaatacagagaatacttctggatcgtgtcaaagactatcaaggtggtacctcatgatcaagtggaattcatcccaaggaaagagaaagtaataaagggcatctaaagtggaacggaggaagtaaaactgtttctgtttgaaaacaacatgatcatatatatctctacaaactctaccagaaaattaattataactgaaaggcaaattcagtaaagttgcagtatataacatcaacctgccaaaatcagtagcacttcaagagaccaacaacaaactagcagaaaaagaaaccaaaaagcaagcccatgtataatagctataaaaaataataataagatacctaagaataaattaaacaaggtagtgaaagatctctacaaggaaaactattaaacactgataaaaagaaactgaagagggcacaaataaaggaaaagaaagtccatgttcatgaataggaagaatattgtgaaaatgaccaaactaccaaaagcaatctgcagattccatgcaatctctctttctttctctctctctctctctctctctcaaaaaacaattatgttcttcacagaaatagaaaaatcctaaaatctgtatggtactacaaaattttccaagtagctaaggcaatcctaagtaaaaagaacaaagctggaggcatcacactacctgacttcaaaatatactaaaagccacagtaaccaaaacaacatggtactggcatcaaaaacagatacatagagcaatgaaacagaatagagaacaaaaataaatccacacatatgaagtcaactcatttttgtcaaatgtggcaaaaacatacattggagaaaggatagtatattcaatcaatggtgctaggaatactaactatccatgtgtagaacaatgaaactaaaccccatttctcaccacatacaaaagtcaatttgaaatggattaaagacttaaatgtaagacttgaaactatgataccactagaagaaaacatagggaaaattctcagcacatttgtctgggcaaagatttttggagcgagacctcaaaggaaaaataacaaaagcaaaaacagacaaatgggatgataacaagctaaaaagcttctgcacggataaagaggcaatcaagaaagtgaaaagacaacctatagaaagggggaaatatttgcgaactattcatgtgacaaaggattaataaccaccatatataatgaactcaattccacagcaaaaagacaatccaaaaaaaaacagacaaatgagggaaggcatagcaagatggccaaatagaaccctccagcaatcatcctctgcaggaacaccaaattgaacaaccatccatgcaagaaagcaccttcttaagaactaaaaattagaggtgagtggacagagcacctggttttaacatgatatcaaggaaagaagcattgaagagataagaaagactgactcacattgcctacaccaccaatccccatccaccatcagcacatggagagacaatctgtgtacttgggggagggagaacaaagtgactgtggggctttgcattggaactcagtgattccttatcacagcagaacataacacaaggcagaatttggccaatgcccatggagtgggctcttagagcaccttcagccagagggtaatcttacaccccagcagtaggcacctgagtggtggctagccccaccaccagttcactaaagtgcccctgggttctgaacaaatttgaaatgcagtctaggccaaaaggactgcagtcattggacaagtcctggggctgtgctgggctaagagctgctggacttggggtgcacatgacccagtgacacatgagatggggcagccaaaggaatgattgtgtcaccagtggaaaagatctctccctgagctgcactgcctagagtgtaaggaggggtgatgctggaaactcaaaaagccagagtgccttttcttctccaaatgactgcaatacctctccagcaagagcacagaactggtctgaggctgagatggctgaaatgacaggagcaggcttcaggaggtgggtaataatgaacttcactgagataaaggagcatgtcctaacccaatgcaaagaagctaacaatcatgaaaaaacaatataagagctgataatgagaatagccattttagaaaggagcataactgacctgatgaagctaaaagtaaaacacaggaaattcacaatgcaatcacaagtaccaatagcagaacagaccaagcagagaaaagaatatcaaagcttgaagacgatctttctgaaataatacaggcagacaagaatagagaagaaagaatgaaaaggaatgaacaaaaccgctgagatatatgggattacataaaaagaccaaacctacaactgattgagttacctgaaggagatggagagaacagaactaggttggaaaacatacttcaggatatcatccaggagatcttccccaaccaagcaagacaggccaacattcaaattcaagaaatccagagaacctcagtaagatactccacaagaagatcaaccccaagacacataatcatcagattctccaaggtcaaaatgaaaaaaaaaaaaaaaaaaacgttaagggtagccagagaaaaaagacaggtcatctacaaaggaaagcccaccagaataacagcagacccctcagtggaaaccctacaagccagaagagattggaagccaatattcaacattcttaaaaaaatttccaacccagaatttcacatctggccaaactaagcttcataagcgaagaagagataagatccttttcaaagaagcaaatgctgagggaattcatcaacacgcctgccttgcaagagctcctgaaggaagcactccatatggaaaggaaagaccattactagccactacaaaaacgcactgaagtacacagaagaacagtgacactatgaacaaccacatgaacaagcctgcaaaataaccagctaacaccatgatgacacgatcaaattcacacataacagtattaaacttaaatgttaatgggctaaatgccccaattaaaagacacagaatggcaagatggataaaaagttaagaccattggtatgccgtcttcaggagacccatctcatgtgcaaagacatacataggctcaaaataaagagatggaggaaaatttaccaagcaaatggaaaacaaaaaaaaagcagggatcacaatcctactttctgacaaaacagactttacattatcaaatatcaaaaaagacaaagaagggcattacataatgataaaaggttcaattcaatagaaagagctaaataacctaaatacatatgcacccaatagagcagcacccagattcataaagcaagctcttagagacctacaaagagacttagactcccacaaaataatagtgggagactttaaaacctcactgacaatattagatcatcgagacagaaaattaacaaagatattaaggacctgaactaaggtctggatcaagcgaacctgatcgatatctacagaactctccaaccaataccaacaggatatacattcttctgattgccacatggcacttactctaaaatagatcacataatcagaagtaaaacacacctcagcaaatgcaaaagaactaaaatcaagacagtctctcagatgacagcacaatcaaattagaactcaatgttaagacactcactccaaccctcacaactacaaggaaactgaacaacctgctcctgaattgactactgggtgaataattgaggcagaaatcaagaagttctttgaaaataatgagaacaaagagacaatgtaacagaatctctgggatgctgctaaagcagggttaagacacaagtttataacactaaatgtccacatcaaaaagccagaaagatctcaaatgagcagcctaacatcacaactaaaagaactgtagaatcaagagcaaagaaaccacaaagctagtagaaagcaagaaataaccaggatcagagcagacgtgaaataaattgagatgaaaaaaaaaaaaagcccttcaaaaaaaaaaaaaaatcaatgaatctggaagatggttttttgaaaaaattaataaaatagaccgctagctacacacataataaaaatgagaatcaaatagacacaattattaatgataacagggatatcactgctgatcgcacagaaatactaaccaccaatagagaatactatgaacatctctatgcccataaactagaaaatctagaagaaatgaataaatgactggatgcatatgccctcccaagactgaaccaggaacaaactgaatctctgaatagaccaacaacaagctctgaaattgaggcagtaataaatagcctaccatccaaaccagaaggatatacagctcaattctaccagaggcacaaaaaagagctggtaccagctaacatcataatgacaggatcaaattcacacctaacaatattcactttaaatgtaaatgggctaaatgctccaattaaaaggcacagactggcaaattggatagagtcaagacccatcagtgtgctgtattcaggagactcatctcatgtgcagagacacacagaggctcaaaataaagggatggaggaagatctaccaagcaaatggaaaacaaaaaaaggcaggggttgcaatcctagtctctgataaaacagactttaaaccaacaaagatcaaaaaagacaaagaaggctattacataatggtaaagggatcaattcaacaagaagagctaactgtcctaagcatatatgcacccaatacaggagcaaccagattcataaagcaagtccttagagacctacaaagagacttagactccaaacaataataatgggagacttttaacaccccactgtcaacattagacagatcaacgagacagaaagttaacaaggatattcaggaattgaactcagctctgcaccaagcagacttaatagacatctaacgaactctccacaccaaatcaaaagaatatacattcttctcagcaccatgtcacacttattccaaaatcaacatagttggaagtaaagcactcctcaggaaatgtaaaacaacagaaattataacaaactgtctctcagaccacagtgcaatcaaactagaactcaggattaagaaactcactcaaaaccactcaactacatggaaactgaacaacctgctcctgaatgactactgggtacataacaaaatgaaggcagaaataaagatgttctttgaaaccaatgagaacaaagacacaacataccagaatctctgggacacattcaaagcagtgtgtagagggaaatttatagcactaaatgcccacaaaagaaaacaggaaagatctaaaactgacaccctaacgtcacaattaaaagaactagagaagcaagagcaaacacattcaaaagctagcagaaggcaagaaataactaagatcagagcagaactgaaggagatagagatacaaaaaaacccttcaaaaaaatcaatgaagccaggagctggttttttcaaacaaaattgatagacttctagcaagaataacaaagaaaagagagaataaccaaatagatgcaataaaaaatgataagggggatatcaccaccgatcccacagaaatacaaactaccatcagagaatactataaacacctctacacaaataaactagaaaatctagaagaaatggataaattcctagacacacacaccctcccaagactaaaccaggaagaagctgaatccctgaatagacgaataacaggctctgaaattgaggcaataattaatagcctcccaaccaaaaaaaatgcaggaccagacggattcacagccaaatttgaccagaggtacaaggaggagctggtagcattccttctaaaactattccaatcaatagaaaaagacagaatcctccctaactcattttatgaggccagcatcatcctgataccaaagcctgacagagacacagcaaaaaaagagaattttagaccaatattcctgatgaacatcgatgcaaaaatcctcaataaaatactggcaaaccgaatccagcagcacatcaaaaagcttatccaaaatgatcaagtgggctttatctctgggatgcaaggctggttcaacatatgcaaatcaataaacgtaatccagcatataaacagaaccaaagacaaaaaccacatgattatctcaatagatgcagaaaaggcctttgacaaaattcaacagcccttcatgctaaaaactctcaataaattaggtattgatgggatgtatctcaaaataataagagctatttatgacaaacccacagccaatatcatactgaatgggcaaaaactggaagtattcactttgaacactggcacaagacagggatgccctgtctcaccactcctattcaacatagtgttggaagttctggccagggcaatcaggcaggagaaagaaataaagggcattcaattaggaaaagaggaagtcaaattgtccctgtttgcagatgacatgattgtatatttagaaaaccccattgtctcagcccaaagtctccttaagctgataagcaacttcagcaaagtctcaggatacaaaatcaatgtgcaaaaatcacaagcattcctctacaccaataacagacaaacagagagccaaatcatgagtgaactcccattcacaattgcttcaaagagaataaaatacctaggaatacaacttacaagggatgtgaaggacctcttcaaggagaactacaaaccactgctcaacgacataaaaaaggacacaaacaaatggaagaacattccatgctcatggataggaagaagcaatatcgtgaaaatggccatactgcccaaggtaatttatagattcaatgctgtccccatcaagctaccaatgactttgttcacagaattggaaaaaactactttaaagttcatatggaaccaaaaaagggcccacattgccaagacaatcctaagccaaaagaacaaagctggaggcatcacactacctgacttcaaactatactacaaggctgcagtaaccaaaacagcatggtactggtacaaaaacagagatatagaccaatggaacagaacagagccctcagaaataataccacacatctacaaccatctgatctttgacaaagctgagaaaaacaagcaatggggaaaggattccctatttaacaaacggttctgggaaaactggctagccatatgtagaaagctgaaactggatccctttcttacaccttatacaaaaattaattcaagatggattaaagacttaaatgttagacctaaaaccataaaaaccctagaagaaaacctgggcaataccatttaggacataggcatgtgcaaggacttccaaaagcaatggcaacaaaagcaaaaatagacaaatgggatctaattaaactaaagagcttctgcacagcaaaagaaactaccatcagagtgaacaggcaacctacagaatgggaaaaaatttttgcaatctactcatctgacaatgggctaatatccagaatctacaaagaacttaaacttaaaaagaatctacaaatttacaagaataaaaccaccccatcacaaagtgggcaaaggatatgaacagacacttctcaaaagaagatatttatgcagccaacagacacatgaaaaaatattcgttgtcactggtcatcagagaaatgcaaatcaaaaccacaatgagatactatctcacaccagttagaatggcgatcattaaaaactcaggaaacaacaggtgctggagaggatgtggagaaataggaacactcttacactgttggtgcgactgtaaactagttcaaccattatggaagacagcgtagcgattcctcaaggatctagaactagaaataccatctgacccagccatcccattactgggtatatacccaaaggattataaatcatgctactataaagacacgtgcacacgtatgtttaatgtggcactattcacaatagcaaagacttggaaccaacgcaaatgtccatcaatgatagactggattaagaaaatgtggcacatatacaccatggaatactatgcagccataagaaaggatgagttcatgttttgtagggacatggatgaagctagaaaccatcattctcagcaaactattgtaaggacaaaaaaccaaacaccgcatgttctcacttataggtgggaactgaacaatgagaacacttggacacaggaaggggaacatcacacactggggcctgttgtggggtggggggagtggggagagatatcattaggagatatacctaatgtaaatgacaagttaatgggtgcagcacaccaacacggcacatatataaatatgtatcaaacctgcacgtggtgcacatgtaccctagaacttaaagtataaaaaaaaatacacatttaaataaaaaaaaagagctggtaccatttctactaaaactacttcaaaccaattaaaaggagggacttctatctaattcattctatgaggccagcaatattttgataccaaaatctggcagagatacaacaaaaacagaaaacttgaggccaatatacctgatgaacattgatgcaaaaatcctcaacaaaatactggcaaattgaatccagcagatcatcaaaagcttatccactatgatcaagtcagcttcatccttgggatgcaaggctggttaaacatatgcaaatcaataaatgtaattaagcacataaacagaactaaagacaaaaacaacatgattatctcaatagatgcagaaaaggccttcaataaaattcaacatcccttcatgttaaaaactctcaataaactacgtattgaaggactataactcaaaataataagagccacataggacaaacccataaccaatatcatattgaaaaggcaaaagctggaagcattacctgtgaaaactaggacaagaagaggattccctctctcaccactcctattcaacacagcattggaagttctggtcagggcagtcaggcaagagaaataaagtattcaaacaggaagagaggaagtcaaattaactttgtttgcagataacgtgatcccatatctagaaaatcccatcatctcaacccaaaagcttcttaagctgataggccacatcggcaaagtctcaggataaagtcaatagtgcaaaaatcactagcattcctatacaccaacaacaggcaagcaaagggccaaatcatgaatgaactctcattcacaactgctacaaagagaataaaatatctagaaatatcactaaccagacaggtgtaggacctcttcagggagaactacaaaccgctgcttaaggaaatcagagagaacacaaatggaacaatatgccacgctcatggataggaagaatcaatattgtgaaaatggccatactgcccaaagtaatttatagattcagttctattcccataaacctatcattgacattcttcacagaattagaagaagctattttaaaattcctatgaaacaaaaagagcccaaatagccaagagaatcctaaggaaaaagaacaaggctgcaggcatcactatccaacttcaaattatactacaaggctcaagtaaccaaaacagcatggtactggtacaaaaacagacacacagaccaatggaacagaacagagaattcaaaaataagactgaacttctacagccatctgatctttgacaaacctgacaaaaacaagcaacggggaaaggattccctatttaataaatggtgctgggagaaccggctagccatatgcagaaaattgaaactggacccttacatcttacataaaaattaactcaagatggattaaagacttaaatgcaaaacccaacactataaaaaccctagaagaaaacctaggcaatattattcaggacataggcacaggcaaagatttcatgacaaaaatgccaaaagcaattgcgacaaaagcaaaaactgacagatgggatctaattaaactaaagagcttcagcacagcaaaagaaacatcatcagagtgaacagacagcctacagaatgggagacagaatctacaaggaacttaaacaaatttacaagaaaaaaacaaacaaccacactaaaaagcgggcaaatgacatgaacagacatttcccaaaaggagacattcaaggagccaacaacacatactggggcctgtcaggtgggtggtgggagagagagaatcaagaagaatagctgctttctttctttatggcaagatggccgaataggaacagctccggtctgcagctcccagcgacatcaatgcataaggtgggtgatttcaacatttccaagtgaggtacacggttcatctcattgggactggttagacagtgggtgcaacccacagagggagagctgaagcagggtagggtgtcgcctcacccagcaagagcaagagggtcagggaattccctcccctagccaagggtagccatgagggactgtgccttgaggaacagtgcactccagcccagttactatgcttttcccatggtcctcgcaatccacacaccaggagattccctcgggtgcctacaccaccagggacctgggtttcaagcacaaaactaggtgaccatttgggcagacactgagctaactgcagcatattttttcacactccggtggtgcctggaacgccagcaagcagaaccattcactaccctagaaaggggggtgaagccagagagccaagtggtctagctcagtggatctcattcccatggagccaagcaagctaagatccactgtcttgaaattcttgctgccagcacaccagtctgaagttgacctgggacactcgagcttggtggggggaggggtgtctgccattactaaggcttgagtaggcagttttcccctcacagtgtaaacaaagccatcaggaagttcaaactgggtggagcccactgtagttcagcaaagccactgtagccagactgcctcacaggattcctcctctgggcagggcatctctaaaagaaaggcagcagccccattcaggggcttatacatcaaactcccatctccctgggacagagcacctaggggaaggggcggcagcaggcactgcatcagcagacttaaatgttccagcctgtctgttctgaagagaggagcgaatctcccagcacattgctcaagctctgctaagggatagactgcttcctcaggtgggtccctgacccccgtgcctcctgactaggagacacctcccaacagggagcgacagacacctcatacaggagagctctggctggcatctggtgggtgcccctctgggacaaagcttccagagggcagcaatctttgctgttctgcagcctccgctggtgatacccaggcaaacaggggcagggtctgaagtggacctcctgcaaactccagcagacctgcagcagaggagcctgaccattggaaggaaaactaacaaacagaaaggaataagatcaacattaacaaaaaggaggtccatacagaaaccccatctgaaggtcaccaacatcaaagaccaaaggtagataaatccacgaagatgaggaaaaaccagcataaaaaggctgaaaattccaaaaatcagaatgcctcttctcctccaaaggatcacaactcctcgccaagggaacaaaactggatggagaatgagtttgacaaattgacagaagtaggctttagaaggtgggtaataacaaactcctccaagctaaaggagcatgttctaacccaatgcaacgaagctaagaaccttgaaaaaaggttagaagaattgctaaccagcataactggtttaaagaagaatataaatgacctcatggaactaaaaaacacagcacaagaacttcgtgaagcatacacaagtatcaatagccgaaccgatcaagtggaagcaaggatatcagagattgaagatcaacttaatgaaataaagcgagaagacaagataagagaataaagaatgaaaagaaacgaaaaacgcctccaagaaatatgggactatgtgaaaagaccaaatctacatttgattggtgtacctgaaagtgacggtgagaatggaaccaagttgtaaaacactcttcaggatattatccaggagaacttttccccaacctagcaagacaggccaacattcaaattcaggaaatacagagaccgccacaaagatactcctcaagaagagtaaccccaagacacataattatcagatttaccaaggttgaaatgaaggaaaaaatgttaagagcagccagagagaaaggtcgggttacccacaaagggaagcctatcagactaacagcagaaaccctacaagccagaagaaagtggggggtagaggagcaatattcaacattcttaaagaaaagaattttcaacccagattttcacatccagccaaactaagcttcacaagtgaaagagaaataaaatcctttacagacaagcaactactgagagattttgtcaccaccaggcctgccttacaagagctcctgaaggaagcactaaatatggaaaggaaaaactggtaccacccactgcaagaacataccaaattgtaaagaccatcaacactatgaagaaactgcatcaagtaacgggcaaaataaccagctagcatcataatgacaggatcaaattcacacataacaatattcactttaaatgtcaatgggctaaatgccccaattaaaagacacagactggcaaactggacaaagagtcaagacccatcactgtgctgtatttaggagacccatctcaggtgcaaagacacacataggctcaaaacaaagggatggaggaatatttaccaagcaaatggaaagtgaaaaaaacagaggttgcagtcctagtctctgataaaaaagactttaaaccaagaaagatcaaaaaagacaaagaagggcattacataatggtaaagtgatcaatacaacaagaagagctaactatcctaaatatatatgcacccaatacaggagcacccagattcataaagcaagttcttagagacctacaaagagacttagactcccacacaataatagtgggagattttaacaccccactgccaatattagacagatcaacgagacagaaaattaacaaggatattcaggacttcaactcagctctggaccaagaggacctaacagacatctacagaactcttcatcccaaatcaacagaatatacattcctctcagcactacatcgcacttattctgaaatcgatcacataattggaagtaaaacactcctcagcaaatgcaaaagaacggaaatcataacagtctctcagaccacagtgcaatcaaattggaactcaggattgagaaactcataatcaaaactgcacaactacatggaaactgaacaacctgctcctgaatgactactaggtaagtaacaaaatgaaggcagaaataaagatgttctttgaaaccaaaaagaacgaagacacaacataccagaatctctgggacacatttaaagcagtgtgtagggggaaatttatagcactaaatgcccaatagagaaagcaggaaagatccaaaattgacaccctaacatcaaaattaaaagaactagaaaagcaagagcaaacaaattcaaaagctagcagaagacaagaaataactaagatcagagcagaactgaaggaaatagagacacaaaaaacccttcaaaaaatcaataaatccaggaactggttttttgaaaagattaacaaaataggtagaccgctagccagaccaataaagaagaaaagagagaagaatccaatagacccaataaagtgtgataaaggggatatccccactgatcccacagaaatacaaactaccatcagagaatactatgaacacctctatgcaaataaactagaaaatctagaagaaatggataaatttctggacacatacaccctcccaagactaaaccaggaagaagtcgaatccctgaagaggccaataacaagttctgaaatggagacagtaattaatagcctaccaaccaataaaagcccaggaccagaaagattcacagccaaattctatcaggggtacaaagaggagctggtaccattccttctacaaactattccaaaaaactgaaaaagagtgactcctccctaactcattttatgaggccagcatcatcctgataccaaaacctggcagagacacaacaaaaagagaaaattttaggccaatatacctgatgaacatcgatgtgaaaatcctcagtaaaatactggcaaaacgaatccagcagcacgtcaaaaagcttatccaccatgatcaagtcggcttcatccctgggatgcaagcctggttcaacatacacaaatcaataaacataatccatcacataaacagaaccaatgataaaaaccacatgattatctcaatagatgcagaaaaggtctccaataaaattctacacccctttaggctaaaaacactcaataaactataccgattgaacgtatctcaaaataataagagctatttatgaacccacagccaatgtcatactgaatgggcaaaaactggaagtattcactttgaacactggcacaagacagggatgccctctctcaccactcctgttcaacatagtgttggaagttctggccagggcaattcggcaggagaaagaaataaaggatattcaattaggaaaagaggaagtcaaattgtccctgtttgcagatgacatgattgtatatctagaaaaccccattgtgtcagcccaaaatctccttaagctgataagcaacttcagcaaagtctcaggatacaaaatcaatgtacaaaaatcacaagcattcttatacaccaataacagacaaacagagagccaaatcatgagtaaactcccattcacaattgcttcaaagagaataaaatacctaggaatccaacttacaagggatgtgaaggacctcttcaaggagaactacaaaccactgctcaaggaaataagagaggatacaaataaatggaaaaacattccatgctcatgggtaggaagaatgcatatcgtgaaaatggccatactgcccaaggtaatttatagattcaatgccatcctcatcaagctaccaatgactttcttcacagaattggaaaaaactactttaaagttcatatggaaccaaagaagagcccgcatcgccaagtcaatcctaagccgaaagaacaaagctggaggcatcatgctacctgacttcaaactatactacaaggctacagtaaccaaaacagcatggtactggtaccaaaacagagatatagatcaatggaacagaacagagccctcagaaataactccgcatatctacaactatctgatctttgacaaacctgagaaaaacaagcaatggggaaaggattccctatttaataaatggtgctgggaaaactggctagccatatgtagaaagctgaaactggatccctttcttacaccttatacaaaaattaattcaagatggattaaagattaaagacttaaatcctttttttaagtctctatattctcccatattaggattttacgttactatatgctgtcttttattatgagccaaaatacaaaactcattactgtagtctaattgcttatagccttcatttgggtgattattggtggtagtgtgggccaaagagtataaaatatatttaagccatgggggtgtgtgtgtgtgtgtgtgtgtgtgtgtgtgtgtgtgtgtgtgtgtgtgtttaagacaggttcttgctctgtcatataggctggagtatagtggtgctatcatagctcactgtagccccaaacttctgggctcaagtcatcctcccaagtagctaggactacaggtgtgcaccaccacacctggctaactttctaattgtttgtagagacaggatcttgctatgttgcccagactagtcatggagtcctggcctctaacagttctcccactttaggctcctaaagcactgggattacaagcatgagccgccaaacctgtaagccattcatgttttatttaaagagcattttatacatcaggagatgggggcgaaacattgattggaaaactgatgtggtttttttttttttttaaatacgctacttattctttaggaattgaaatcaaattatggtaaacaacaaagtagaaacagttttggaaagagtaaaagaagacatattttagaagttctcgaattgattcactcctgtgaatattaatgttagctagagtctgagaattgtttttctagctcagagctagataatctgtaagttgttggttagatgatgatattagttttggagatacatgacaagttctgtacacaatactgtttctggagagtgaattgatggaccatctctaatctacaactcttttaaaattaaaatttaaagttttatttttgcagtgctaaagatcacagttgtctcctgaggatagattttgattgcatatggccgtgaaattcctacctaatatactttgtacagctctgcatacttaatatgcaaagtggttgctgtagcaggagatctactatgtttctgtgctgaaatctgattgctatttttgtatatatgaaatgttaatcacaattttattttttctaacaggaaatattttctcttttacaggggatctttcctgcaaattacattcacttgaaaaaggcaattgtcagtaatagggggtgagtaattggccttactaaatttatgtacaatttttataggctacagaggaagattgtttttccttttggttcatagtataaaatatacaattgatatgttttcctggcaaaaatgtacatgctttatcatgtaattttgagggaataatgttttcttaaaatacagactttaatctgttttcttgtatacggaagaaatgatgttagctgtgaattttataaaatcagttaggcatgcagtatgttttaaaaaattatgtactattttgagcatagtcattcatagagtaggagttaaagataaatatgtcattttgtttttacaaagtgaaagagacttttaaaattttttatttgcaagttgaaattgaaaaagtttaaaggtataccttaaccataagaagacaatatacaaaatggtttgatcacaaattttaaaaacaaagcaatctgcctaaaaagagacaagaaataaatatatcaaaatgttaacacttgtttttgcatgttgggaatatgaatgagtttttaaaaaattctttgtcatgtttaataataagtattatagtttcgattttatttttcaaaatttattattttaaaacataaaatttaggtactgtataatttgtaaccaaggtagcttcctaaagtagaaatactattcttgactgcagggtgagtaagcatcagagtaaccttctggtcagttatggttcattcaggaaaatagaaacatgagccactttatgaggtagaatttaatgtgggaaattatttacacacgtttgaagagtgaaagaacaaaagaggaaatactgatgtaacccatagattttaactgcataaagtggcctacacgttaataatggtggagataccgaaacccaggaactcagaaattagatcttgagatattggagctcagaaatttgaggagggaatatcaaatagctactgttggtatgtataaagaaggtggtaatgaggctgttttggggaatgccaaaagcaactggaggctggaacctattttcactgtgaaagaaattgtttacaggaacagcaggaaacacacctcttcaccttcttttccccagtatctttctaatgcttccagctggcaaaggagactgcaaaacacagcttgtggattgcagcctcatgattagtccttagaagaatagatttggagatgatagttattattaattgtcttgtatgccttccaatataaaatttgtgttggggaaatagtaagaatataacttagaagattctgatatgaatccacaactagcatacttcttattcttccccttctccttttacaaaacatgtaaagccataaggacataaaaaagaaaaacaacttatacatctcatgtttatgaacctttgcaacaaataatctgccatctcaagtttataagtaaggactatcaaaagtatcaagcctggatagaagtgtgggaaaaggaaaagagagtatttcgacttgggattagcaaagtatatattttggaaagtgctaaaaacattttctgaatgtgaatggcttattataaaattcagaagtaatatcctttatttatcagtaatgaggctgatcagagctgaaagtgggcagaagctgtgagggaccaaggtgagaaaaggagatatagatgaaatctagggatgcagaaatagagtgccttagaaaatactagcaaagtcatacactttctgatgatgaggaacttatcctaagtttatgagtcatatgtcccatttataatagttataaaggacattggggagcactttgctagcagaagaatacctacctggattcagtttgcctcaggaaagtagaagtgatgtggctgtacataaaattacacacagagcagccatatttgctggaagtgggatataaatcttagaaagctatttggaattgacctccatatccaaatgtccaataagttgatggtccacaataagaattctaaaatctggagaaaatattaaaaaacaattgtctgcaggcactggagaacaattggttgggcaagatcttgagaggctatgatctttgaaggaagggatgcacacaaggagagcttcatgtttactttggcctttttctccagataatttttcatttactgtgttgtagtggaatagagcccaaccagaaaatagtagtctttcatgacatcagcaatttggcagaataagaagtttcagctctcatccccctacagaaacacagatttaacaatggtataccaagaaaaatacctttataagaggtccagtatccagtgaagaagtcgcagtactccagaggagcacaaaacagagtagacacgttgaaatggctaagaagagcaatttcactcttacctttgtcagtcccttctcccagctggttaagagagaatttgtcccagattgtgactcttccagtggggcaaagaaaaagaggactgtacatcaaacatctctagcatttgtgggtgctgcttgaatgacctctttctatcccacctcacccagagtgctggagtagccagcataatttaaacatgcaggggaagctaagaacaaagaaaaggagtgagaggctcactgcagctagcttgcctctgcaagatcgggaaaagtgcacaaccctaagatttctgcaggagggagggtgaggagtgggagcaatatcccatcatttcaatgcatcactctagaaaaaagtggagggcaggcaactgtggccagtagagctctggagggttgggagaagatgcatatctgtgagtcttctccctcagaagggaaaggaagaatgaagcatacatcctggaattttagagtactgccacagggaaaagagatgggcagcttactgtggccatcatttctttgagagattgggagaaggcacagaaccctgagactctcaggctggatggaggaatgaagtgcgtacattcatagaaaaggtttgacaggttcccagaatctgagttgggctgattggtgagggtctttgtctattgaagtcagtccataaagaccgggagaagtggttgtttcttcaaatgtgcaggccccaaagcaaagctgcaaggaagatgaaggatcgggaatacatgacacaatcaaaggaacaaaataaatattcaataacagaccctaaagaaaaggagttctatgaattgccctcaagacaactcaaaataatagtcttaaagattacttaactaaatgagttacaagagaatacaggcaactaaattaaatgaggaaaatgaaaagtgaaaataatgagaataccaacaaagagatagaaaccataagaaagcaaagaatcaaacataaattctggagctgaagaatacaataagtaatatgaaaattgtatggagaacttcaacagcattcttgatcaaatagaggagcgagtcaacttgaagataggtcatttgaaatgatccattcagagaatcagaaaggaaaaagagggaagaaatcctaagaaactaatgggacaccatcaagcaaaccaatatgctcaatatggaattatcacacgtggggcaggagagagaggaagagggagagcaaggaaaagaaaggagcaggaaacttatttaaagaaacaatggctgaaaacttcccaaatctggggagggaaatgaacattgatccttgaagtccaaacaacccctttaagatgttcatgtcctttgtagggacatggatgaagctggaagccatcattctcagcacagtatcacaaggacaaaaaaccaaataccgtgtgttctcattcataggtgggaactgaataatgagaacattgggacacaggaaggggaacatcacacaccggggcctgtcgttaggtgaggggaggggggaggggggagggatagcattaggagatatacctaatgtaaatgacgagttaatgggtgcagcacaccaacatggcacttgtatacctatgtaacaaaccggcacgttgtgcacatgtaccctagaacttaaagtataattaaaaaaacaggaatccaaagaaatccatgctgagatgcattgtggtcaaattgtcaaaagtcaaagagaattttgaaagcagcaagatgaaaaggacttgtcttatataagagagcctccataaatctgctatcagcagatttctccgccaaaaccttgtaggccagaagggagcaggatgatatatttaaaatactgaaggaaacaaaaaaaaccctgtcaaccagtacccagcaaaactgtccttcagaaatgaagtagagagaaaggctttcccagataaacaaaagctgagggagttcatcaccagtagatttgccttataaaaaatgctgaaaggagttctttaagttgaaacaaaatgatgctatacagcaacatgaaagcatacaaaagtatacaattcacaggcaaaggcaaatatatacacatatacagaatatttgaatactgtaaagatagtatataaataattttagtataagagttaaaagacaagtattaagaataactataactacaaaaacttgttagtagatgcacaatataaaatatgtaaattgtgtcatcaacaataaaacatttgttgagggaattaaaattgtcaggtttttgtttttgatttttttttacagcatgcaaatcttttaagtttagcaaatcttaattttaagggaactatgaatagtgattggttctgtttacatagttggttaattaagctttattcttatatattcttcccatctgttaggtcacacaattcttgagcgttaaaacaatgttctgttgaattctaggtctcccagctgtatttgactatttggttacaattccaaattgttattctgactgctaagtgatttactttcaaagtattgctccagtaatgttaaaggtgtaatttctaccacttcttcttcaattaaaggacattttaatggctttttttctttatcaattgggataaaagcctcaaacaaaaaacatcagaaatgaatcacataaaagagtaatcttagtttttatttcagcatccatatgaaatgcttagttaccttattttatccccgctttttttttttttttttttaaaacttgaaaaactctttttttccttcaactttaattttaacttccagggtacatgtccatcacgtgcaggtttgttatacaggtaaacgtgtgccatggtggtttgctgcacagatcacccatcacctaggtattaagcccagcattcattagctgttcttcttcttcttttttttttaaggaaattatatttattcaggaatgagcattgcaatggcagtacataggccgtcataaactgtgtacccatgtgcatgcttagggaggtaaggggatacaaagatttctttttaaaatttttttattatactttaagttctgggatacatgtgcagaatgtgcaggtttgctacataggtatacatgtgccatggtggtttgctgcacccatcaacccgtcatcaacattaggtatttctcctaatgctatccctcccctagctccccaacccccaacaggccccagtgtgtgatgcttccctcttcatgtccatgtgttctcactgtttaactcccacttatgagtgagaacatgtggtgtttggtcttctgttcctgtgttagtttgctgagaattatggtttccagcttcatctatgttgctgcaaaggacatgaactcatcccttttttatggctgcatagtattccgtggtgtgtatgtgccacattttctttatcaagtctatcattgaagggcatttgggttggttggttccaagtttttgctattctgaacagtgctgcaataaacatatgcatgcatgtgtctctatagtagaatgatttataatcctttgtgtatatacccagtaatgggattgctgggtcaatttgtatttctggttctagatccttgaggaatcgccacactgtcttccacaatggttgaactaatttacactcccacgaacagtgtaaaagtgttcctatttctccacatcctctccagctaatgattgccattctaactggcgtgagacggtatttcattgtggttttgatttgtatttctctaatgatcagtgatgatgagctttttctcatatgtttattggccacataaatgtcttcttttgagaagtgtctgttcatctcctttgcccactttttgatggagttgtttttttcttataaatttgtttaatctttgtagattcaggatattgtcagatggagagattgcaaacattttctcccattctgtaggttgcctgttcactctgatgatagtttcttttgctctgcagaagctttttagtttaattagacaccatttgtcatttttggcttttgttgccattgcttttggtgttttagtcatgaaatctttgcccatgcctctgccctgaatggtattgcctaggtttttttctagggtttttatggttttaggtcttacgtttaagtctttaatccatcttgagttaatatttgtataagattctgtaaggaaggggtccagtttcagttttctgcatatggctagccagttttaccaacaccatttattaagtaggcaatcatttccccattgcttgtttttgtcaggtttgtcaaagatcagatggttgtagacatgtagtgttatttctgaggcctctgttctgttccattggtctgtatatctgttttgtactagtaccttgtgttttggttaatgtagccttgtagtatagtttgaagtcaggtagtgtgatgcctccagctttctttttgcttaggattgttttggctatacgggctcttttgtggttccataggaaatttaaagtagtttttttctaaactgtgaagaaagttagtggtagcttgatggggatgacactgactctataaattactttgggcagtatggccattttcatgatactgattcttcctatccatgagcatggaatatttttccatttgtttgtgtcctctctgatttccttgagcagttgtttgtagttccacttgaagaggtccttcacatcccttgtaagttgtattcctaggtattttattctctttgtagcaattttgaatgggagttcactcatgatttggctgtttgtctattattggtgtataagaatgcttgtgatttttgcacattgattatgtatcctgagagtttgctgaagttgcttatcagcctaaggagattttgggctgacacgatggggttttctaaatatacaatcatgtcatctgcaaacagagacaatttgattttctctcttcctatttgaataccctttatttctttctcttgcctgattgcccttgccagaacttccaacactatgttaaataggcatggtgagagaaccttgtcttgtgccagttttcaaaaggaatgcttccagcttttgcccattgagtatgacattggctgtgggttcataaatagctcttattattttgagatacgttcaatcggtatagtttattgagtgtttttagcctaaaggggtgtagaattttattggagaccttttctgcatctattgagataatcatgtggtttttatcattggttctgtttatgtgatggattatgtttattgatttgtgtatgttgaaccaggcttgcatcccagggatgaagccgacttgatcatggtggataagctttttgacgtgctgctggattcgttttgccagtattttactgaggattttcacatcgatgttcatcaggtatattggcctaaaattttctctttttgttgtgtctctgccaggttttggtatcaggatgatgctggcctcataaaatgagttagggaggagtcactctttttcagttttttggaatagtttgtagaaggaatggtaccagctcctctttgtacccctgatagaatttggctgtgaatctttctggtcctgggcttttattggttggtaggctattaattactgtctccatttcagaacttgttattggcctcttcagggattcgacttcttcctggtttagtcttgggagggtgtatgtgtccagaaatttatccatttcttctagattttctagtttatttgcatagaggtgtttgtagtattctctgatggtagtttgtatttctgtgggatcggtggtgatatcccctttatcattttttattgcgtctatttgattcttctctcttttcttctttattagtcttgctagcagtctatcaattttgttgatcttttcaaaaaaccagctcctggattcattaattttttgaagggttttttgtgtctctatttccttcagttctgctctgatttgggttatttcttgccttctgctagcttttgaatgtgtttgctcttgcttttctagttcttttaattgtgatgttagggtgtcaattttggatctttcctgctttctcttgtgggcatttagtgcacaaatttcccactacacattgcttttaatgtatcccagagattctggtatgttgtgtctttgttctctctggtttcaaagaacatctttatttctgccttcattttgttacttacctagtagtcattcaggagcaggttgttcagtttccatgtagttgtgcagttttgattatgagtttctcaatcctgagttccaatttgattgcactgtggtctgagagactgttatgatttccgttcttttgcatttgctgaggagtgttttacttccaattatgtgatcgatttcagaataagtgcgatgtagtgctgagaggaatgtatattctgttgatttgggatgaagagttctgtagatgtctgttaggtcctcttggtccagagctgagttgaagtcctgaatatccttgttaattttctgtctcgttgatctgtctaatattggcagtggggtgttaaaatctcccactattattgtgtgggagtctaagtctctttgtaggtctctaagaacttgctttatgaatctgggtgctcctgtattgggtgcatatatatttaggatagttagctcttcttgttgtattgatcactttaccattatgtaatgcccttctttgtcttttttgatctttcttggtttaaagtcttttttatcagagactaggactgcaacctctgtttttttcactttccatttgcttggtaaatattcctccatccctttgttttgagcctatgtgtgtctttgcacctgagatgggtctcctaaatacagcacagtgatgggtcttgactctttgtccagtttgccagtctgtgtcttttaattggggcatttagcccattgacatttaaagtgaatattgttatgtgtgaatttgatcctgtcattatgatgctagctggttattttgcccgttacttgatgcagtttcttcatagtgttgatggtctttacaatttggtatgttcttgcagtgggtggtaccagtttttcctttccatatttagtgcttccttcaggagctcttgtaaggcaggcctggtggtgacaaaatctctcagtagttgcttgtctgtaaaggattttatttctctttcacttgtgaagcttagtttggctggatgtgaaaatctgggttgaaaattcttttctttaagaatgttgaatattgctcctctaccccccactttcttctggcttgtagggtttctgctgttagtctgataggcttccctttgtgggtaacccgacctttctctctggctgctcttaacattttttccttcatttcaaccttggtaaatctgataattatgtgtcttggggttactcttcttgaggagtatctttgtggcggtctctgtatttcctgaatttgaatgttggcctgtcttgctaggttggggaaaagttctcctggataatatcctgaagagtgttttacaacttggttccattctcaccgtcactttcaggtacaccaatcaaatgtagatttggtcttttcacatagtcccatatttcttggaggcttttttcgtttcttttcattctttattctcttatcttgtcttctcgctttatttcattaagttgatcttcaatctctgatatccttgcttccacttgatcggttcggctattgatacttgtgtatgcttcacgaagttcttgtgctgtgttttttagttccatgaggtcatttatattcttctttaaaccagttatgctggttagcaattcttctaaccttttttcaaggttcttagcttcgttgcattgggttagaacatgctcctttagcttggaggagtttgttattacccaccttctaaagcctacttctgtcaatttgtcaaactcattctccatccagttttgttcccttggcgaggagttgtgatcctttggaggagaagaggcattctgatttttggaattttcagcctttttatgctggtttttcctcatcttcgtggatttatctacctttggtctttgatgttggtgaccttcagatggggtttctgtatggacctcctttttgttaatgttgatcttattcctttctgtttgttagttttccttccaatggtcaggctcctctgctgcaggtctgctggagtttgcaggaggtccacttcagaccctgcccctgtttgcctgggtatcaccagcggaggctgcagaacagcaaagattgctgccctctggaagctttgtcccagaggggcacccaccagatgccagccagagctctcctgtatgaggtgtctgtcgctccctgttgggaggtgtctcctagtcaggaggcacgggggtcagggacccacctgaggaagcagtctatcccttagcagagcttgagcaatgtgctgggagattcgctcctctcttcagaacagacaggctggaacatttaagtctgctgatgcagtgcctgctgccgccccttcccctaggtgctctgtcccagggagatgggagtttgatgtataagcccctgaatggggctgctgcctttcttttagagatgccctgcccagagaggaggaatcctgtgaggcagtctggctacagtggctttgctgaactacagtgggctccacccagtttgaacttcctgatggctttgtttacactgtgaggggaaaactgcctactcaagccttagtaatggcagacacccctccccccaccaagctcgagtgtcccaggtcaacttcagactggtgtgctggcagcaagaatttcaagacagtggatcttagcttgcttggctccatgggaatgagatccactgagctagaccacttggctctctggcttcacccccctttctagggtagtgaatggttctgcttgctggcgttccaggcaccaccggagtgtgaaaaaatatgctgcagttagctcagtgtctgcccaaatggtcacctagttttgtgcttgaaacccaggtccctggtggtgtaggcacccgagggaatctcctggtgtgtggattgcgaggaccatgggaaaagcatagtaactgggctggagtgcactgttcctcaaggcacagtccctcatggctacccttggctaggggagggaattccctgaccctcttgctcttgctgggtgaggcgacaccctaccctgcttcagctctccctctgtgggttgcacccactgtctaaccagtcccaatgagatgaaccgtgtacctcacttggaaatgttgaaatcacccaccttatgcattgatgtcgctgggagctgcagaccggagctgttcctattcggccatcttgccataaagaaagaaagcagctattcttcttgattctctctctcccaccacccacctgacaggccccagtatgtgttgttggctccttgaatgtctccttttgggaaatgtctgttcatgtcatttgcccgctttttagtgtggttgtttgtttttttcttgtaaatttgtttaagttccttgtagattctgtctcccattctgtaggctgtctgttcactctgatgatgtttcttttgctgtgctgaagctctttagtttaattagatcccatctgtcagtttttgcttttgtcgcaattgcttttggcatttttgtcatgaaatctttgcctgtgcctatgtcctgaataatattgcctaggttttcttctagggtttttatagtgttgggttttgcatttaagtctttaatccatcttgagttaatttttatgtaagatgtaagggtccagtttcaattttctgcatatggctagccggttctcccagcaccatttattaaatagggaatcctttccccgttgcttgtttttgtcaggtttgtcaaagatcagatggctgtagaagttcagtcttatttttgaattctctgttctgttccattggtctgtgtgtctgtttttgtaccagtaccatgctgttttggttacttgagccttgtagtataatttgaagttggatagtgatgcctgcagccttgttctttttccttaggattctcttggctatttgggctctttttgtttcataggaattttaaaatagcttcttctaattctgtgaagaatgtcaatgataggtttatgggaatagaactgaatctataaattactttgggcagtatggccattttcacaatattgattcttcctatccatgagcgtggcatattgttccatttgtgttctctctgatttccttaagcagcggtttgtagttctccctgaagaggtcctacacctgtctggttagtgatatttctagatattttattctctttgtagcagttgtgaatgagagttcattcatgatttggccctttgcttgcctgttgttggtgtataggaatgctagtgatttttgcactattgactttatcctgagactttgccgatgtggcctatcagcttaagaagcttttgggttgagatgatgggattttctagatatgggatcacgttatctgcaaacaaagttaatttgacttcctctcttcctgtttgaatactttatttctcttgcctgactgccctgaccagaacttccaatgctgtgttgaataggagtggtgagagagggaatcctcttcttgtcctagttttcacaggtaatgcttccagcttttgccttttcaatatgatattggttatgggtttgtcctatgtggctcttattattttgagttatagtccttcaatacctagtttattgagagtttttaacatgaagggatgttgaattttattgaaggccttttctgcatctattgagataatcatgttgtttttgtctttagttctgtttatgtgcttaattacatttattgatttgcatatgtttaaccagccttgcatcccaaggatgaagctgacttgatcatagtggataagcttttgatgatctgctggattcaatttgccagtattttgttgaggatttttgcatcaatgttcatcaggtatattggcctcaagttttctgtttttgttgtatctctgccagattttggtatcaaaatattgctggcctcatagaatgaattagatagaagtccctccttttaattggtttgaagtagttttagtagaaatggtaccagctctttttttttatttaaatgtgtatttttttttatactttaagttctagggtacatgtgcaccacgtgcaggtttgatacatatttatatatgtgccgtgttggtgtgctgcacccattaacttgtcatttacattaggtatatctcctaatgatatctctccccactccccccaccccacaacaggccccagtgtgtgatgttccccttcctgtgtccaagtgttctcattgttcagttcccacctataagtgagaacatgcggtgtttggttttttgtccttacaatagtttgctgagaatgatggtttctagcttcatccatgtccctacaaaacatgaactcatcctttcttatggctgcatagtattccatggtgtatatgtgccacattttcttaatccagtctatcattgatggacatttgcgttggttccaagtctttgctattgtgaatagtgccacannnnnnnnnnnnnnnnnnnnnnnnnnnnnnnnnnnnnnnnnnnnnnnnnnnnnnnnnnnnnnnnnnnnnnnnnnnnnnnnnnnnnnnnnnnnnnnnnnnnnnnnnnnnnnnnnnnnnnnnnnnnnnnnnnnnnnnnnnnnnnnnnnnnnnnnnnnnnnnnnnnnnnnnnnnnnnnnnnnnnnnnnnnnnnnnnnnnnnnnnnnnnnnnnnnnnnnnnnnnnnnnnnnnnnnnnnnnnnnnnnnnnnnnnnnnnnnnnnnnnnnnnnnnnnnnnnnnnnnnnnnnnnnnnnnnnnnnnnnnnnnnnnnnnnnnnnnnnnnnnnnnnnnnnnnnnnnnnnnnnnnnnnnnnnnnnnnnnnnnnnnnnnnnnnnnnnnnnnnnnnnnnnnnnnnnnnnnnnnnnnnnnnnnnnnnnnnnnnnnnnnnnnnnnnnnnnnnnnnnnnnnnnnnnnnnnnnnnnnnnnnnnnnnnnnnnnnnnnnnnnnnnnnnnnnnnnnnnnnnnnnnnnnnnnnnnnnnnnnnnnnnnnnnnnnnnnnnnnnnnnnnnnnnnnnnnnnnnnnnnnnnnnnnnnnnnnnnnnnnnnnnnnnnnnnnnnnnnnnnnnnnnnnnnnnnnnnnnnnnnnnnnnnnnnnnnnnnnnnnnnnnnnnnnnnnnnnnnnnnnnnnnnnnnnnnnnnnnnnnnnnnnnnnnnnnnnnnnnnnnnnnnnnnnnnnnnnnnnnnnnnnnnnnnnnnnnnnnnnnnnnnnnnnnnnnnnnnnnnnnnnnnnnnnnnnnnnnnnnnnnnnnnnnnnnnnnnnnnnnnnnnnnnnnnnnnnnnnnnnnnnnnnnnnnnnnnnnnnnnnnnnnnnnnnnnnnnnnnnnnnnnnnnnnnnnnnnnnnnnnnnnnnnnnnnnnnnnnnnnnnnnnnnnnnnnnnnnnnnnnnnnnnnnnnnnnnnnnnnnnnnnnnnnnnnnnnnnnnnnnnnnnnnnnnnnnnnnnnnnnnnnnnnnnnnnnnnnnnnnnnnnnnnnnnnnnnnnnnnnnnnnnnnnnnnnnnnnnnnnnnnnnnnnnnnnnnnnnnnnnnnnnnnnnnnnnnnnnnnnnnnnnnnnnnnnnnnnnnnnnnnnnnnnnnnnnnnnnnnnnnnnnnnnnnnnnnnnnnnnnnnnnnnnnnnnnnnnnnnnnnnnnnnnnnnnnnnnnnnnnnnnnnnnnnnnnnnnnnnnnnnnnnnnnnnnnnnnnnnnnnnnnnnnnnnnnnnnnnnnnnnnnnnnnnnnnnnnnnnnnnnnnnnnnnnnnnnnnnnnnnnnnnnnnnnnnnnnnnnnnnnnnnnnnnnnnnnnnnnnnnnnnnnnnnnnnnnnnnnnnnnnnnnnnnnnnnnnnnnnnnnnnnnnnnnnnnnnnnnnnnnnnnnnnnnnnnnnnnnnnnnnnnnnnnnnnnnnnnnnnnnnnnnnnnnnnnnnnnnnnnnnnnnnnnnnnnnnnnnnnnnnnnnnnnnnnnnnnnnnnnnnnnnnnnnnnnnnnnnnnnnnnnnnnnnnnnnnnnnnnnnnnnnnnnnnnnnnnnnnnnnnnnnnnnnnnnnnnnnnnnnnnnnnnnnnnnnnnnnnnnnnnnnnnnnnnnnnnnnnnnnnnnnnnnnnnnnnnnnnnnnnnnnnnnnnnnnnnnnnnnnnnnnnnnnnnnnnnnnnnnnnnnnnnnnnnnnnnnnnnnnnnnnnnnnnnnnnnnnnnnnnnnnnnnnnnnnnnnnnnnnnnnnnnnnnnnnnnnnnnnnnnnnnnnnnnnnnnnnnnnnnnnnnnnnnnnnnnnnnnnnnnnnnnnnnnnnnnnnnnnnnnnnnnnnnnnnnnnnnnnnnnnnnnnnnnnnnnnnnnnnnnnnnnnnnnnnnnnnnnnnnnnnnnnnnnnnnnnnnnnnnnnnnnnnnnnnnnnnnnnnnnnnnnnnnnnnnnnnnnnnnnnnnnnnnnnnnnnnnnnnnnnnnnnnnnnnnnnnnnnnnnnnnnnnnnnnnnnnnnnnnnnnnnnnnnnnnnnnnnnnnnnnnnnnnnnnnnnnnnnnnnnnnnnnnnnnnnnnnnnnnnnnnnnnnnnnnnnnnnnnnnnnnnnnnnnnnnnnnnnnnnnnnnnnnnnnnnnnnnnnnnnnnnnnnnnnnnnnnnnnnnnnnnnnnnnnnnnnnnnnnnnnnnnnnnnnnnnnnnnnnnnnnnnnnnnnnnnnnnnnnnnnnnnnnnnnnnnnnnnnnnnnnnnnnnnnnnnnnnnnnnnnnnnnnnnnnnnnnnnnnnnnnnnnnnnnnnnnnnnnnnnnnnnnnnnnnnnnnnnnnnnnnnnnnnnnnnnnnnnnnnnnnnnnnnnnnnnnnnnnnnnnnnnnnnnnnnnnnnnnnnnnnnnnnnnnnnnnnnnnnnnnnnnnnnnnnnnnnnnnnnnnnnnnnnnnnnnnnnnnnnnnnnnnnnnnnnnnnnnnnnnnnnnnnnnnnnnnnnnnnnnnnnnnnnnnnnnnnnnnnnnnnnnnnnnnnnnnnnnnnnnnnnnnnnnnnnnnnnnnnnnnnnnnnnnnnnnnnnnnnnnnnnnnnnnnnnnnnnnnnnnnnnnnnnnnnnnnnnnnnnnnnnnnnnnnnnnnnnnnnnnnnnnnnnnnnnnnnnnnnnnnnnnnnnnnnnnnnnnnnnnnnnnnnnnnnnnnnnnnnnnnnnnnnnnnnnnnnnnnnnnnnnnnnnnnnnnnnnnnnnnnnnnnnnnnnnnnnnnnnnnnnnnnnnnnnnnnnnnnnnnnnnnnnnnnnnnnnnnnnnnnnnnnnnnnnnnnnnnnnnnnnnnnnnnnnnnnnnnnnnnnnnnnnnnnnnnnnnnnnnnnnnnnnnnnnnnnnnnnnnnnnnnnnnnnnnnnnnnnnnnnnnnnnnnnnnnnnnnnnnnnnnnnnnnnnnnnnnnnnnnnnnnnnnnnnnnnnnnnnnnnnnnnnnnnnnnnnnnnnnnnnnnnnnnnnnnnnnnnnnnnnnnnnnnnnnnnnnnnnnnnnnnnnntctgcttggtgcagagctgagttcaattcctgaatatccttgttaactttctgtctcgttgatctgtctaatgttgacagtggggtgttaaaagtctcccattattattgtttggagtctaagtctctttgtaggtctctaaggacttgctttatgaatctggttgctcctgtattgggtgcatatatgcttaggacagttagctcttcttgttgaattgatccctttaccattatgtaatagccttctttgtcttttttgatctttgttggtttaaagtctgttttatcagagactaggattgcaacccctgcctttttttgttttccatttgcttggtagatcttcctccatccctttattttgagcctctgtgtgtctctgcacatgagatgagtctcctgaatacagcacactgatgggtcttgactctatccaatttgccagtctgtgccttttaattggagcatttagcccatttacatttaaagtgaatattgttatgtgtgaatttgatcctgtcattatgatgttagctggtaccagctcttttttgtgcctctggtagaattgagctgtatatccttctggtttggatggtaggctatttattactgcctcaatttcagagcttgttgttggtctattcagagattcagtttgttcctggttcagtcttgggagggcatatgcatccagtcatttattcatttcttctagattttctagtttatgggcatagagatgttcatagtattctctattggtggttagtatttctgtgcgatcagcagtgatatccctgttatcattaataattgtgtctatttgattctcatttttattatgtgtgtagctagcggtctattttattaattttttcaaaaaaccatcttccagattcattgattttttttttttttgaagggctttttttttttttcatctcaatttatttcacgtctgctctgatcctggttatttcttgctttctactagctttgtggtttctttgctcttgattctacagttcttttagttgtgatgttaggctgctcatttgagatctttctggctttttgatgtggacatttagtgttataaacttgtgtcttaaccctgctttagcagcatcccagagattctgttacattgtctctttgttctcattattttcaaagaacttcttgatttctgcctcaattattcacccagtagtcaattcaggagcaggttgttcagtttccttgtagttgtgagggttggagtgagtgtcttaacattgagttctaatttgattgtgctgtcatctgagagactgtcttgattttagttcttttgcatttgctgaggtgtgttttacttctgattatgtgatctattttagagtaagtgccatgtggcaatcagaagaatgtatatcctgttggtattggttggagagttctgtagatatcgatcaggttcgcttgatccagaccttagttcaggtccttaatatctttgttaattttctgtctcgatgatctaatattgtcagtgaggttttaaagtctcccactattattttgtgggagtctaagtctctttgtaggtctctaagagcttgctttatgaatctgggtgctgctctattgggtgcatatgtatttaggttatttagctctttctattgaattgaaccttttatcattatgtaatgcccttctttgtcttttttgatatttgataatgtaaagtctgttttgtcagaaagtaggattgtgatccctgctttttttttgttttccatttgcttggtaaattttcctccatctctttattttgagcctatgtatgtctttgcacgtgagatgggtctcctgaagacggcataccaatggtcttaactttttatccatcttgccattctgtgtcttttaattggggcatttagcccattaacatttaagtttaatactgttatgtgtgaatttgatcgtgtcatcatggtgttagctggttattttgcaggcttgttcatgtggttgttcatagtgtcactgttcttctgtgtacttcagtgcgtttttgtagtggctagtaatggtctttcctttccatatggagtgcttccttcaggagctcttgcaaggcaggcgtgttgatgaattccctcagcatttgcttctttgaaaaggatcttatctcttcttcgcttatgaagcttagtttggccagatgtgaaattctgggttggaaatttttttaagaatgttgaatattggcttccaatctcttctggcttgtagggtttccactgaggggtctgctgttattctggtgggctttcctttgtagatgacctgtcttttttctctggctacccttaacgttttttttttttttttttttcattttgaccttggagaatctgatgattatgtgtcttggggttgatcttcttgtggagtatcttactgaggttctctggatttcttgaatttgaatgttggcctgtcttgcttggttggggaagatctcctggatgatatcctgaagtatgttttccaacctagttctgttctctccatctccttcaggtaactcaatcagttgtaggtttggtctttttatgtaatcccatatatctcagcggttttgttcattccttttcattctttcttctctattcttgtctgcctgtattatttcagaaagatcgtcttcaagctttgatattcttttctctgcttggtctgttctgctattggtacttgtgattgcattgtgaatttcctgtgttttacttttagcttcatcaggtcagttatgctcctttctaaaatggctattctcattatcagctcttatattgttttttcatgattgttagcttctttgcattgggttaggacatgctcctttatctcagtgaagttcattattacccacctcctgaagcctgctcctgtcatttcagccatctcagcctcagaccagttctgtgctcttgctggagaggtattgcagtcatttggagaagaaaaggcactctggctttttgagtttccagcatcacccctccttacactctaggcagtgcagctcagggagagatcttttccactggtgacacaatcattcctttggctgccccatctcatgtgtcactgggtcatgtgcaccccaagtccagcagctcttagcccagcacagccccaggacttgtccaatgactgcagtccttttggcctagactgcatttcaaatttgttcagaacccaggggcactttagtgaactggtggtggggctagccaccactcaggtgcctactgctggggtgtaagattaccctctggctgaaggtgctctaagagcccactccatgggcattggccaaattctgccttgtgttatgttctgctgtgataaggaatcactgagttccaatgcaaagccccacagtcactttgttctccctcccccaagtacacagattgtctctccatgtgctgatggtggatggggattggtggtgtaggcaatgtgagtcagtctttcttatctcttcaatgcttctttccttgatatcatgttaaaaccaggtgctctgtccactcacctctaatttttagttcttaagaaggtgctttcttgcatggatggttgttcaatttggtgttcctgcagaggatgattgctggagggttctatttggccatcttgctatgccttccctcatttgtctgttttttttttggattgtctttttgctgtggaattgagttcattatatatggtggttattaatcctttgtcacatgaatagttcgcaaatatttccccctttctataggttgtcttttcactttcttgattgcctctttatccgtgcagaagctttttagcttgttatcatcccatttgtctgtttttgcttttgttatttttcctttgaggtctcgctccaaaaatctttgcccagacaaatgtgctgagaattttccctatgttttcttctagtggtatcatagtttcaagtcttacatttaagtctttaatccatttcaaattgacttttgtatgtggtgagaaatggggtttagtttcattgttctacacatggatagttagtattcctagcaccattgattgaatatactgtcctttctccaatgtatgtttttgccacatttgacaaaaatgagttgacttcatatgtgtggatttatttttgttctctattctgtttcattgctctatgtatctgtttttgatgccagtaccatgttgttttggttactgtggcttttagtatattttgaagtcaggtagtgtgatgcctccagctttgttctttttacttaggattgccttagctacttggaaaattttgtagtaccatacagattttaggatttttctatttctgtgaagaacataattgttttttgagagagagagagagagagaaagaaagagagattgcatggaatctgcagattgcttttggtagtttggtcattttcacaatattcttcctattcatgaacatggactttcttttcctttatttgtgccctcttcagtttctttttatcagtgtttaatagttttccttgtagagatctttcactaccttgtttaatttattcttaggtatcttattattattttttatagctattatacatgggcttgctttttggtttctttttctgctagtttgttgttggtctcttgaagtgctactgattttggcaggttgatgttatatactgcaactttactgaatttgcctttcagttataattaattttctggtagagtttgtagagatatatatgatcatgttgttttcaaacagaaacagttttacttcctccgttccactttagatgccctttattactttctctttccttgggatgaattccacttgatcatgaggtaccaccttgatagtctttgacacgatccagaagtattctctgtattaccaggcagagactcttgttctttttccttactttctcccaaacaagcaaaatctccctctctgtgttttgagccatctgtagctggggatggagtgacacaagcacctctgtggtcactaggtctgtgctgggtcagacctgaagcttcatggcactgaatgtcacccaaggactactataaccactccctggctactgtgtatgtttgctcaaggccctggtgctctacagtcagcaggtggcaaagccagccaggcctgtgtccttcccttcaggatgccaagtttccttagtccccaggtgggtccagaggtgatgtccaggagccaggaactagtaaaaaactttagaagtctacttggtgttctattgtgctatgtagttgagctgttactgaaaccacaagacaacatccttcccccttttccctcccttttccaaaggcagagaaacctcaccctgtagccactgctgccacaggcccacaggcccacagggagtactgccagactactgttgatgttcccttaagtcttaagggctccagagtcagcgtgcagtgaatcttgccttgcctgggactcacccttcagggcagtggcctcctctctgacccaggacagctccagaaatgccatccaagagccaagtcctggaatcgagggcccctagaggctgctttgttccctactgaccggtgaccaagctggttcctaaggtgcaagagaaagccccttttacttttcccctccacttttctcaagcggaagtcttgccctgtagcaaccagagctgggaatgttctgtgtctcacctgaaggcagcaggtctcagattctcacccaaggcccttgacatagtacctgggtatcactggtgtttattcgtggcccgagggcttttcagttagcaggtgatcaatttattttggagtgggtccttcccttcaaggctgcgggttttcttctggcctgggtatgtttagtttagtaggttagtaaggtctgagagttaggacctggaaaggggaccttgtgattgactggtgccctgtcttgctgtggttgagctgttatccagtatgcaaaacaaagtcttcccactctttcctttccttaagcagaagggaggggtcttttggagttgcaagctgtgcagcctggggctaggggaggggtgatgtcagcactcccttagttgctttggctcttgtcccattaggtgtcatgcacctctccagtccactggctctgggcccagttcagcactcacataggagtttcagtacttgtgccctggactgcctttcaagattatttaggaccccagagcatgttcacagtggtgaggcttgtgggaactcaccttccaaccactggaattgttgattcccttctggctacagctggtttacaatgatcccttcgttggtgggcatcagctgagtttcatctgtgttgtttttgtgctataacagaatagcactgaattcagtgcgttagaattgctgcaagttccctctcttcagtgcacaggaaccctctctgtactactgctgggggattgggaaggagtggtattggcgattcacgattgttttttatacctctttagtgcctgtttcagcagtatgaagttaaaaccaggtactatatgggggtcatccgaattttagttctcataaaggtgcttttttggagtggatacttgttaaattggtgtccttgtgttgcggggagaggacagttgatggagccttgtattctggcatcttgctttgtcctccctgtattgtctctcttattttattttattttattttatttatttgggtcttttttttcatggttagtataggtagtagtttgtcagttttgtttaccttctttaaaaacccagtttttattttgtggctctttgtatttttttcctcaattttgtttatttcggctctatagtttattttcttatgttaactttaggtttggtttgttcttgctcatctaattatttacattcattcttgttgttcatttgaggttgttcatttgagagctttctactttttttatattggcattgatttctataaactttcctcttaataccacttttgctgtatccataggttttagtatgttgtgtttctattttcacttgttacaagaaatgtttaaattttattcttcactttttcattgagacattgtttattctgaaacatgttgtttaatttgcatgtaactgcaactttgaaagtttttcttgttgttgatatgtagttttattgtggtcagaaaagatagttgatacgatttcagttcttttaagtttgttgagacttgtgttgtggcctaacatacagtctattctggagaatgtttcatgtgctgatgatatgaatgtttattcttcagctattggatgaaatgttctttaatgtctgtttggtccatttaatgtaatgtgtagtttaaatccaatgtttctttgttgattttctgtccagatgatctgtctaatgccgatagtagggtgttgaaatctccaacaccaattcattctttaatttttgcttttcccacaatggggagacttaaccaatgggatccctcttggtgtcatgtttgacatggcctacaagcatttgcagtggtgctgggttctaggtggatgttattgaagtggctgtgggactagtgttctagcttctgggtgtcatggatgtattgcaacacctgggtcttggggtttaggtttgctgtctgtggcagagttggatatagattgcccacacagccaagatttgtgaatttgaggcaccccttagcaatgtgggcccagagtgccaggttttagttgtaattctacttgtgcatggcagggcacagcactggcttgactccagggaagaggtgttctggaggtttgggcctaggagcaggatacagctgcagtttggcatccccaatccaatagaactcaggggcagggcatgaagcatcttgtagtagtgactctagaccatgagatggcggggctttgcagtatcccagactatgtgaggtcaggtacaggggcagaatgtacctgcccctgtagaatggtgaagcacagctgttgtttggtccctggagggtgcagggaacagtacagcaatgactcccctccccagcgagagcagtctttcagcagtgtatgctctaggggacgagttcacctgcatggaaggcaggatgctagtattgtgtggcctgtagggcaaggtgtccaagttcagacaccattctgtttctctgggatatggggtactgcaccaactcagtcctggaatgcgcagctgctccacttgccagggcagcagtttcccagggggtgatgtgctgcttcagctgaggcctggggagagtgactgttctgggtgacccaggtatcattttcctggaatgcagggaggtgcttcagctgaggtactggggtgtatagccactctggatggccaaggcactattttgtttcagcttagttactggggaggcatgactgctctaggtgaccaaggtaccgtgttttcaagatgagggtactacctcagctctggcccatagcagtagggggaaggttaggtagagtcgccccatctttgcttgtttctatggggaggggtctaacagttgctctcaacttagcttggggatatccagccatagatttgggatggttctgtgatgcctcagccacagcgatgaaggaatgccatgtctgctcgcccccagagcaagatacactccagccatagttccacttccaaaatggagacatgcgatagccatgtgggccataggggatgggacatggtgtcggctccttctctggggaaagcacagctatgtggactccaggcagctccctcagctgggtttaagttcctatgaggactgcattggcctgagtgttgaggccttcaactgtccagggtgttaatgtgtgttcctgggatcctttagcttaactccttactgttgggataagtcgctctgtcgcccaggctggagtgcagtggcacaatctcactctgttacccaggctggagtgtagtggcgcaatcttggctcactgcaagctccgcctcctggtttccagctgagcccagttgggagatgggcccgatgcttccttccattctctacatggccaactttctcttctcaccagagtttgtattgctcctttgatgcactctggcactctccctcagttatttttgttaaaatgtagttgtcttggccaggcacggtggctcacacctgtaatcgcagcactttgggaggctgaggctggtggatcacgaggtcaggagatcgagaccatcctggtgaaaccccgtctctggtaaaagtagaaaaaaattagctgggtgtggtggcgggcacctgtaatcccagctattcaggaggctgaggcaggagaatagtgtgaacccggtagggggagcttacagtgagccgagattgcgccactacattccagcctgggcaacagagtgagattgtgccattgcactccagcctgggcaacagagcgagactccgtttcaaaaaaaaaaaaaaaaaagtagttgtcttataattgttttggctccctttatgagggggacaagtgctaggggcttctaattgtacatcttgcttggtaatcatttcaaaatacatattttaagaaagtaagaaagacctatggaatgtaataatgttgaaatattagaggaaagacacggatgttccaattacttgtcatagtaatgatgtattatttttattacactattgcctttgattttctagatttttgcttctgtatttatatgtgtgattggtctatgattttcttttcttgtcatatcctttactaatttgggtctaaatattattctagcttcatagcatgaattgaatgaccttcacatgatttctagactgagaaagttaatgtagagattaaccattctttaaaggtttgataaaacttgacttttaaaatgtctgggcctgctatctttagataatgggttgggtagtagggtgggtaggggagaaaaacttgattacttggttaattcagttgctttaatggttttttttatttatccaggtgtcctatttcttcttgagtaaattttagtactttatattttcctggaaatgtttgcatccatattattttttagatttattactataagcttatcattgtatttttaaggatattttaaattttcagctctaatagatgattatgctcaccccttttactctaatactgtttttgtgttttttaaaatttttcttcacatcaacttttttggaagtttttctgctttgactttataaagaaccagtgtttttattttgcatattcttaatattgtttgttttctatctcattaatttttttcagttgtcatgaatgatagtttgtattttgtatttttacgtaactctgaagttttgtttttatttttattatactttaagttctagggttcatgtgcataacgtgcagctttgttacatatgtatacatgtgacatgttggtgtgctgcatccattaactcatcatttacattaggtatatctcctaatgctatcccttctccctcccccaaccccatgacaggccccggtgtgtgatgttccccaccctgtgtccaggtgttctcattgttcagttctcacctgtgagtgagaacatacagtgtttggttttctgtccttatgatagtttgctgagaatgatggtttccagcttcatccatgtccctacaaaggacatgaactcatccttttttatggctgtgtagtattccatggtgtatgtgtgccacattttcttaatccagtctatcattgatggacatttgggttggttccaagtctttgctattgtgaatagtgccacaataaacatacgtgtgcatgtgtctttatagtagcatgctttataatccgttggatatatacccagtaatgggatgcctgggtcaaatggtatttctagttctagatccttgaggaatcgccacactgtcttccataatggttgaattagtttacagtcccaccaacagtgtaagagtgttcctatttctccacatcctctccagcacctgttgttacctgactttttaatgattgccattttaactggtgtgagatagtatctcattgtggttttgatttgcatttctctgatggccagtgataatgagccttttttcatgtgtctgttgactgcataaatgtcttcttttgagaagtgtctgttcatatcctttgcccactttttgatggggttgtttgattttttcttgtaaatttgtttaagttctttgtagattctggatattagtgatttgtcagatgggtagattgtagaaattttctcccattctgtagattgcctgttcactctgatggtagtttcttttgctgtgtagaagctctttagtttaattagatcccatttgtctattttggcttttattgccattgcttttggtgttttagtcatgaagtccttgcccatgcctacgacctgaatggtattgcctaggttttcttctagggtttttatggttttaggtctaacatttaagtctttaatccttcttgaattaattttcgtataaagtgtaaggaagggatccagtttcagctttctatgtatagctagccagttttcctagcaccatttattaaatagggaatcctttccccatttcttgtttttgtcaggtttgtcaaggatcagatggttgtagatgtgtggtattatttactgagggctctgttctgttccatggtctatatctctgtttgnnnnnnnnnnnnnnnnnnnnnnnnnnnnnnnnnnnnnnnnnnnnnnnnnnnnnnnnnnnnnnnnnnnnnnnnnnnnnnnnnnnnnnnnnnnnnnnnnnnnnnnnnnnnnnnnnnnnnnnnnnnnnnnnnnnnnnnnnnnnnnnnnnnnnnnnnnnnnnnnnnnnnnnnnnnnnnnnnnnnnnnnnnnnnnnnnnnnnnnnnnnnnnnnnnnnnnnnnnnnnnnnnnnnnnnnnnnnnnnnnnnnnnnnnnnnnnnnnnnnnnnnnnnnnnnnnnnnnnnnnnnnnnnnnnnnnnnnnnnnnnnnnnnnnnnnnnnnnnnnnnnnnnnnnnnnnnnnnnnnnnnnnnnnnnnnnnnnnnnnnnnnnnnnnnnnnnnnnnnnnnnnnnnnnnnnnnnnnnnnnnnnnnnnnnnnnnnnnnnnnnnnnnnnnnnnnnnnnnnnnnnnnnnnnnnnnnnnnnnnnnnnnnnnnnnnnnnnnnnnnnnnnnnnnnnnnnnnnnnnnnnnnnnnnnnnnnnnnnnnnnnnnnnnnnnnnnnnnnnnnnnnnnnnnnnnnnnnnnnnnnnnnnnnnnnnnnnnnnnnnnnnnnnnnnnnnnnnnnnnnnnnnnnnnnnnnnnnnnnnnnnnnnnnnnnnnnnnnnnnnnnnnnnnnnnnnnnnnnnnnnnnnnnnnnnnnnnnnnnnnnnnnnnnnnnnnnnnnnnnnnnnnnnnnnnnnnnnnnnnnnnnnnnnnnnnnnnnnnnnnnnnnnnnnnnnnnnnnnnnnnnnnnnnnnnnnnnnnnnnnnnnnnnnnnnnnnnnnnnnnnnnnnnnnnnnnnnnnnnnnnnnnnnnnnnnnnnnnnnnnnnnnnnnnnnnnnnnnnnnnnnnnnnnnnnnnnnnnnnnnnnnnnnnnnnnnnnnnnnnnnnnnnnnnnnnnnnnnnnnnnnnnnnnnnnnnnnnnnnnnnnnnnnnnnnnnnnnnnnnnnnnnnnnnnnnnnnnnnnnnnnnnnnnnnnnnnnnnnnnnnnnnnnnnnnnnnnnnnnnnnnnnnnnnnnnnnnnnnnnnnnnnnnnnnnnnnnnnnnnnnnnnnnnnnnnnnnnnnnnnnnnnnnnnnnnnnnnnnnnnnnnnnnnnnnnnnnnnnnnnnnnnnnnnnnnnnnnnnnnnnnnnnnnnnnnnnnnnnnnnnnnnnnnnnnnnnnnnnnnnnnnnnnnnnnnnnnnnnnnnnnnnnnnnnnnnnnnnnnnnnnnnnnnnnnnnnnnnnnnnnnnnnnnnnnnnnnnnnnnnnnnnnnnnnnnnnnnnnnnnnnnnnnnnnnnnnnnnnnnnnnnnnnnnnnnnnnnnnnnnnnnnnnnnnntgtatgtgtctaggaatttatccatttcttctagattttcctagtttatttgtgtagaggtgtttatagtattcctctgatggtagtttgtatttctgtgggattggtggtgttatcccctttatcattttttattgcatctatttgattcttctctcttttcttctttattagtcttgctaacggtctgtcaattttgttgatcttttcagaaaaccagctcctgtatttattgattttttgaagggttttttgtgtgtctatctccttcagttctgctctgatcttagttatttcttgccttctgctagcttttgaatgcgtttgctcttgcttctctagttcttttaattgtgatgttagggtgtcaattttagatctttcctgctttctcttgtgggcatttagtgctataaatttccctctacacactgctttgaatgtgtcccagagattctggtatgttatgtctttgttctcattggtttcaaagaacatctttatttctgcctttattttgttatgtacccagtagtcattcaggagcaggttgttcagttttcatgtagttgagcagtttagagtgagtttcttaatcttgagttctagtttgattgcactgtggtctgagagacagtttgttacaatttctgttcttttacgtttgcctgaggagtgctttacttccagttatgtggtcagttttggaataagtgtgataagtgatcttttcacacagtcccatatttattggaggctttgttcatttctttttactcttttttctctaacttctcttctgcttcatttcattcagttgatcttcagtcactgataccctttcttccacttgatcaaattggctgctgaagcttgtgcatgtgtcacgtagttcttgtggcgtggttttcagctccatcaggttatttaaggtcttctctatgctgtttattctagttagccattcgtctaatcttttttcaaggtttttagcttctttgcgatgcgtttgaacatcctcctttagctcgaagaagtttgttattactgatcgtctcaaaccttcttctctcaactcgtcaaagtcattctccatccagctttgttccgttgctagcgaggagctgcattcctttggtggagaagaggtgctctgatttttagaattttcagcttttctgctctggtttcttcccatcttggtggttttatctgccttggtctttgatgatggtgacatacagctggagttttggtgtggatgtcctttctgtttgttagttttccttccagcagtcaggaccctcagctgcaggtctgttggagtttgctggaggtccactccagaccctgtttgcctgggtatcaccagcggaggctgcagaacagcaaatattgcagaacggcaaatgttgctgcccaatccttcctctggaagcttcatctcagaggggcacctggctgtattcggtgtcagtcagcccttactgggaggtatctcccagttaggctactcagcggtaaaggacccacttgaggaggcagtctgtccattttcaggtctcaaactctgtgctgggagaaccacttctctcttcaaagctgtcagacagggacgtttaagtctgcagaagtttctgctgccttttgttcaggtatgcctttcccgcagaggtggagtctacagaggcaggcaggcctccttgagctgccatgggctctacccagttcaagcttcctggccactttgttcatctactcaagcctcagcaatggcagacgcccctcccctggcctcactgcctccttgcagtttgatctcagactgctgtgctagcagtgatcgaggctccgtgggtgtaggaccccctgagccaggcatgggatataatctcctggtgtgctgtttgctaagactgttggaaaagcattgtattagggtgggagtgtccaattttccagttactgtctgtcatggcttcccttggccaggaaagggaattccccgaccccttgcgcttcccacgtggggcaatgccccgccctgcttcgtgggctgcacccactgtctgacaagccccagtgagatgaacccggtacctcaattggaaatgcagaaatcacctgtcttctgcgttgctcacgctgggagctgtagactggagctgttcctttttggccatcttggaacctcctccacctctgaagttttgtacttttgttttttgttcttgtcaattctaaggtttatgcacttagccagtttatttttagtcttttttttttttttaatttttttctctccataggttgttgggaacaggtggggtttggttacataagaaagttctctagtggtgatttgtgagattttggtgtacccatcacccaagcagtatacactgcacccaatttgttgtgtttttatgcctctcccccttcccaccttttccccgagtccccaaagtccattgtatcattcttaagccttttcatcctcatagcttagtcccacttatgaatgagaacatactattcttggttttccatttctgagttacttcacttagaataatagacttcagtctcatccaggttgctgtgaatgccatcaattcattcttttttatgtctgagtagtcttccatcatatatatatacaccacagtttctttatccagttgttgattgatgggcatgtagcttggttccacatttttgcaattgcaaattgtgctcctatagacatgtgtgtgcaagcatctttttttgtataatgacttcttttcctctgcatagattcccagtagtgggattggtggatcaatggtagttctacttttagttctttaaggacactccacgctattttccatagtggtttttatttttagtcttttgtcatgcaagaattgaatattatggaattccctctatataatgccttagctgcattccacaatatttaatacttagtataaatttactaattgataatctcacgaatattctcctttagttttataatgtttctcttttgctcttctctaaattgtagattttagtgtaaagctaaaccttatcactacctttttaaaaataggtggggaaacaatcactggggaatggaggaggggaaaagtcaatgaagttaaatttataaatatatacatgacatagcaaggaataatatattatggacattacagacatgtttctctacctggtcacagaaattaatttgtgttaatgatttccttactttacctcccattttataatttctttgccttagccaggtactacttagctgtggtatttgagcccttgatggtttactgtgcagagggatgctgtagtcttccactaatttttaccacagagcatgatagtattatgatattccctggggatcttttgggttccattcatgcttcttcctactctgttgtatagcaccaaaagtacttctgttgaagacttgtaaaaatcatgccaaccaatgccaaaactgctgctgtttttgtttgtttgtttgtttgtttgttcagtggcaggggtaacctgaacctgaaatggcctcatgggaatctcagcttcaatataattgaatcatattgttatctgtgtatgcatgtttcccttgaattctaaattagcagagccagagtcctcaaagatagaaagcaaaaaatttgcaagtgagtcattaggtgtgagaatgagaagttgtcttttacatttctacttcatgtttctggacccatgtattgtggttatgggagaaacataactttatattagttactggttcagaataattgtcgcaatttgtggattgccccatcattaaaaaagctagcataacaaagtcttctatagtcttgtctattgttctatacagtctgttgctctggatgatgaagtaattagtaagatcagttaatctgtgagtgtcagctccttatcttccttctttgtgtttaaaatgagttccttgctcatattccagttttatatgcaacagtgttatggcaaatagggtattgaatagtctactgaaggttatgtttccagaaatgaagcagccagggaaagtaagtccaaatctcatcctctttgtcatgaatggggtcaaaagtatgaacttgcctgtaggcagttggctaatccacttggaatatgtgtaccacatccaagtctcagggttgcccactgctaccggtcagttctgattcagcagttgtggtgtcagatcagccttggtgagggaaagttcatggagttgagctcctctatagctgctatttctttcacagcattcttttcaggatggctgggaaagtaaacagattgaatttacaggacactggggacaattatgcgggtggtgtatggtctaaggaaaatgggcttctctttgcaagataattcactcaggtgatgtagtctcacagcatgtaagcaaggcaaggataccctcatcagcccagaaggagggactttttctgatgccaaaaggaggtttactaggggtggagctcagactttcctaagttatcccatgtctttattctatctccattctgattcacaggttactgttatttttatgtcactaccctgccttttatcttaattttaatgaaaaggccatgaattcaactgatcttgtaattcagcaatccttaggatcaaaacttgagtttgatttttggctatatgagtgatgaagctgaaagagaaaatgaactcttgcatgagcatcaaaaaagtgagcattaagctttttgcagtcctggtttcctgattagatattattcttgcaagtagtattttatgtatatcagattgtctcatccatctgtcaaagtcaaataaatgacaaatctctagacaaagcattttatttggaaggccaggcatattggcacatacctgtagtcttgggtcctcgggaggctgaggcaggaggattgcttgagccaaggagtttgaggccatagtgcactatgatcatgcctgtgaataggcactgctctccagactgggaaacatagcaagactctgcctccttaaaaaaaaaaagttttatttaggaaagcagaatggccattcagggcatacacacagacagggtagtcttctttgtgtccgaagaagaaacagaaggttggggttttattagagaaatgttacatattgttttgaaagaaaacttactaacactagtgaagtttttgggagctggcaagctctgattggttgggtgagtgatggcggtaggtaaaactgttcttaaagtcatggcagttcatttcagcagctactaggtaaaactagtcttttttttttttttttttttttttgagacagagtctcactctgtcgcccaggctggagtgcaaatgacacaatcttggcttactgctacctctgcctcccgggttcaagtgattctcctgcctcagcctcctgagtagctgggattacaaggcacgcaccaccaagcctggctaacttttgtatttttagtagagatagggttttaccatgtcggccaggctggtatcaaactcctgacctcaagtgctccacccaccttggcctcccaaagttatagcaggccattttggcagctggcttgtgatataacccttggacaggtgctttgtgcccgagtgcttctctcctcccctgatgcagtctcttgacattaatttagttgggtatgccaagataattccaattcatgtaaccaatttttatatatccattctacatctgctagatttgttaactcttagttaaagggagaatcagtagatcaacagtacctggaagatttcttgcttttgagcatacaggccaagggttttttaaaaaagtttgcctattaatttgttcattcgtttgttcatccatttatttaattcattctatgacctcattcttggtctatttaccaaagcttttctcaaactcagtctcatgcttttctctaggatggagacaatattagactgtgcttctagttatgcatattttatttataagtgttacaggaaccttgacattatcataaccagagagggttagagatctggggcttcagttagatgaaagtgggacttgaaagggaattagcatgggtgcccactatagcaagatggtgagagttgttgagagtcagctgctaaggaacagtaggaaagatgtgagcacgttatggactgttgggtggagttggtacagcattagacagctgagaagaagaaggagaaactcagtgtcctaaattgtcacattatgtcatggaatgaaaaacaagtacattctggggttatagtttcttgcctgtgttacagcaccaccttctaactggtctccctgtttctatccatgttcccttgcagtttatagtgcaacataactgccagagttgttctttaaaaatatgttagatcatgttactcctctgcttaaaaccttctagcgactcccgtctcacacagagcaaacattgaagttcttacaaaggcttacaagttttatgatgtgacttcctgtcaccctgtaaccttcagtgacactggttttcttgcttttattcagtcatttcaggtatgctcctgccttgaggcttctattgtttcttatgcttgggattagctttgtcacttccttcaggccttttctgaaatcttctcagtgaaacataccttgactacagtatttatttctgcctccttccttcccctcactgacttaaaactggatgctcccacagggcagtggggagtgggggatgaggagggattggttagtgggtaccgaaataccgctagatagaataagatctagtcgtttgatagcacaacaggatgtctatagctaacaataatttattgtatatttcaaaatagctagaagagaagatttagaatgttctcaatacaaagaaatcataaatatttgaggtgatggatattccatttaccaagattttctcattacacattgtgtgcttatatcagaatattacgtgtaccccataaatatgtacaactattatacatccataaaaaatcaaaataaaaataagtactacatgggaaattttaaaaaaggctactgtctctggaaattgactgtagctgctaccaagttgtcgttttttcagtctttgcttctagaagtcattggtttccttttctaagtctgggttgaaaggagcttaggtcatagccctgtgttccccagatgcaggaagagtgataaatcaagtatccatcattttacactcacctaatggaagacagtgtgtctctacattctgcctaggggaaggggattatgaggcagaacagagaaggaaaaaaataatcccacaattgtctgtaacactgccgtttacttcttttgagattcctattagcagtagacgagagtttttccacctctctcccatgtactcttaagtactcgtagatactttgggactgtttttttcccctgacctgcattctagagagatttcatcagtactgtcttgcaactgttttctttgaattctttctaacatgtatcctctctattgaggtttccttttttcactggcaatatttttgtgtgattttattgtgatgatatatatatatatatatataataaagtttaccatttcacctctttaagtgtacaatccagtggcatcaaatacattcacaatgttgtgcagccatcatcacaattcatctccagaactttttcattatcgccaaaagaatctttgtccctgttaaacagttactccccattctccctctacccagcccctggtaatctctattctattttctgtctctatgaattttcatattctaggtacctaatataaatggaataatgacatttgtctttttgtatctggcatatttcactagcatagtgctttcatgattcatctatgttgtagaatgtattagaatttcattcctttttaaggttgaataatattccattgcacttatatataccacatttaatttttccattcatctattgatggacacttgggtgttaatagttttcgtttgcaagtttcctagttgattctattgcatattattggttcttgttttatttgtgcttggttttgtttcatactttttcctttctgaaatggaagtgattcttttcatttctctaagcatcttaaacatttaaaaatgtttatcaggcaatttcataaaattaattttatctgaaaagaatttacagatggttcccagtgtatgatggtttgccttaagatttttctactttacagtggtatgaaagtcatatgcattcagtagaaaccatactttgggtacctgtataaccattgtgttttttactgtcagtacagtgttcaacaagttatatgaaatatttagcactttactataaaacacactttttgttnnnnnnnnnnnnnnnnnnnnnnnnnnnnnnnnnnnnnnnnnnnnnnnnnnnnnnnnnnnnnnnnnnnnnnnnnnnnnnnnnnnnnnnnnnnnnnnnnnnnnnnnnnnnnnnnnnnnnnnnnnnnnnnnnnnnnnnnnnnnnnnnnnnnnnnnnnnnnnnnnnnnnnnnnnnnnnnnnnnnnnnnnnnnnnnnnnnnnnnnnnnnnnnnnnnnnnnnnnnnnnnnnnnnnnnnnnnnnnnnnnnnnnnnnnnnnnnnnnnnnnnnnnnnnnnnnnnnnnnnnnnnnnnnnnnnnnnnnnnnnnnnnnnnnnnnnnnnnnnnnnnnnnnnnnnnnnnnnnnnnnnnnnnnnnnnnnnnnnnnnnnnnnnnnnnnnnnnnnnnnnnnnnnnnnnnnnnnnnnnnnnnnnnnnnnnnnnnnnnnnnnnnnnnnnnnnnnnnnnnnnnnnnnnnnnnnnnnnnnnnnnnnnnnnnnnnnnnnnnnnnnnnnnnnnnnnnnnnnnnnnnnnnnnnnnnnnnnnnnnnnnnnnnnnnnnnnnnnnnnnnnnnnnnnnnnnnnnnnnnnnnnnnnnnnnnnnnnnnnnnnnnnnnnnnnnnnnnnnnnnnnnnnnnnnnnnnnnnnnnnnnnnnnnnnnnnnnnnnnnnnnnnnnnnnnnnnnnnnnnnnnnnnnnnnnnnnnnnnnnnnnnnnnnnnnnnnnnnnnnnnnnnnnnnnnnnnnnnnnnnnnnnnnnnnnnnnnnnnnnnnnnnnnnnnnnnnnnnnnnnnnnnnnnnnnnnnnnnnnnnnnnnnnnnnnnnnnnnnnnnnnnnnnnnnnnnnnnnnnnnnnnnnnnnnnnnnnnnnnnnnnnnnnnnnnnnnnnnnnnnnnnnnnnnnnnnnnnnnnnnnnnnnnnnnnnnnnnnnnnnnnnnnnnnnnnnnnnnnnnnnnnnnnnnnnnnnnnnnnnnnnnnnnnnnnnnnnnnnnnnnnnnnnnnnnnnnnnnnnnnnnnnnnnnnnnnnnnnnnnnnnnnnnnnnnnnnnnnnnnnnnnnnnnnnnnnnnnnnnnnnnnnnnnnnnnnnnnnnnnnnnnnnnnnnnnnnnnnnnnnnnnnnnnnnnnnnnnnnnnnnnnnnnnnnnnnnnnnnnnnnnnnnnnnnnnnnnnnnnnnnnnnnnnnnnnnnnnnnnnnnnnnnnnnnnnnnnnnnnnnnnnnnnnnnnnnnnnnnnnnnnnnnnnnnnnnnnnnnnnnnnnnnnnnnnnnnnnnnnnnnnnnnnnnnnnnnnnnnnnnnnnnnnnnnnnnnnnnnnnnnnnnnnnnnnnnnnnnnnnnnnnnnnnnnnnnnnnnnnnnnnnnnnnnnnnnnnnnnnnnnnnnnnnnnnnnnnnnnnnnnnnnnnnnnnnnnnnnnnnnnnnnnnnnnnnnnnnnnnnnnnnnnnnnnnnnnnnnnnnnnnnnnnnnnnnnnnnnnnnnnnnnnnnnnnnnnnnnnnnnnnnnnnnnnnnnnnnnnnnnnnnnnnnnnnnnnnnnnnnnnnnnnnnnnnnnnnnnnnnnnnnnnnnnnnnnnnnnnnnnnnnnnnnnnnnnnnnnnnnnnnnnnnnnnnnnnnnnnnnnnnnnnnnnnnnnnnnnnnnnnnnnnnnnnnnnnnnnnnnnnnnnnnnnnnnnnnnnnnnnnnnnnnnnnnnnnnnnnnnnnnnnnnnnnnnnnnnnnnnnnnnnnnnnnnnnnnnnnnnnnnnnnnnnnnnnnnnnnnnnnnnnnnnnnnnnnnnnnnnnnnnnnnnnnnnnnnnnnnnnnnnnnnnnnnnnnnnnnnnnnnnnnnnnnnnnnnnnnnnnnnnnnnnnnnnnnnnnnnnnnnnnnnnnnnnnnnnnnnnnnnnntattttactttgtcttgcatatcatttctgcattaatcttagtaaaacacaacactcctttaacatcactcatgtttccctatttccatagtgtcaaatttaaaatctcacagccttgtagtgagtgcagaggtccagatccacagcccccgccttgggcggctgcagcctcactggtgcaagtcttctgcctgctccctgcccacaagagcccagggagacccaggtccacaaccctgacttgggcagctgcagctgtgcccaaaacggtggggctgctacctgctcctggccccctggagcatgcagccccgctgcactccctcacagcctgggccccagcccaggtccttgctgggcccaggccagtgtccagggcagaggcaacgtctccccaggctcccttggtggctccagtgctcaggggcagcgcagagctccccctcacctggcttggggccctgcccagggtgggcacctctgggagtggatcacaggcctcgggccggcaattgggagtgatactgtgcagacccttatggggcagaccctggggatgcgaccctgggcgggcttgtgcagacagcctcttgcagaggcccaggaacccagtgctgtctgtggggtgggcatggcgaccgtacctctggctgatccccgaagtgggcaccactctcacttcccccgaagcgtggccccaagcactgcctcctcccttcaccctccctgcagcagtggcaggagagggcagtgacttggggacagggtctggggccacagaggctccgggcctgggggtgggtcatgcccggctgtgtaagggtgacggcggtgcagtcagctgtctcctggaggtagggcacgggagactcaccactgctcctgcagccactcctgctgccaccgcccatgcctccccactacagacggcctgctgctgccatcagtagcatgaattatctttaatatgccttgctcattattttctctataccactttttatagcatagtacagtgtttagggctctctctccacctgcttacctttcagacccaagcctcttctaggaacttcactttcttcatgaatctttatctgactgcagcagtttacagtgaacctccttttttagaacattagatgttatagttaatgtcacacatttagcacctatttgtgctttatgtttaagttttgttactaagattgtgatttccctgattgtttctatacatctcctaattatctctgcagcattcttaagatgtggtatatggaaataacttcagaaatttcaacttataaccagtagcttgaagaaataaaggatgtcttctcattcaatttgaatttgtgtagcaagtcattatgactttcttctcagatatgacatttatcattagcttactccttttcatctgagaagatcaatatgacctatttcaaaaaattaaagtaaattaaaccatagttattttcctgctcccatcttccccagatactcagccatgctgatcaccacaatatttggggtggggtgagaaaagtgagtctcttgggcagtgtcttacatggctggtggagccgagtgcctaatcattctgctttccgctgtgagagaaattggagggttatggagtttctcttgttgagctgtactgctttgtgggaggagtgatgcaggtaaaatgaaactttcttcttaccctcttcactgcatctattctggattttttgcctcagtggtgtactgaaacttttctgctggattcctagactcccacaaaggtactcttgtccataagttgtggtcaaaattgatgcttcttgggggcagatgacagtagaaagcacctcttctgccatcttgctgatattacctttgtcacattttactcttaacaagcccttgatgaaagcttttatattaatgagcttgtaaattttttggatatagataatgccattgcattatttcaaggtgactttttgtaatctgctgtggtaagtcacacaaaataagaacacagtaaaactgtaagacataatcagataacatatattcattgatgctcaattttactgcactgagtcatctttgaacacagtggtgctttgtcagctgtcttcttgtggaaacaaataatacttgatgctaattttgtggaatacattttcctgtacttttttttttcagatggatgatattccccttggctaataaacgggtataagttacctcaatatatcagtatattaagtctttggtcatagaaagtttttattgaccctcaacattggtgtggacattatagaaatattatcaagttagtccccgtgctttcagtaacttttcattcaggttacttgtgttaagatctggaatttttactgtcttttgaaaaggtcctatgacagctggtcccagtcataccagctttttttcatcttggatgtgtgaaattattttccaactcagtgacatcttgcatacttttctcgtttgcaggtggcaccataactggttttctccctccccacacgcttttcatgtcatgatttttttgcatgtattgggccttgacatttcttcagagaagagttcattgatctgctcattgtaaattgtataacacagctaaaatctttcattgtacttgtattagtctgttctcatgctgctaataaagacatatctgagactgggtaatttataaagaagagatttaatggactcacagttccacgtggctagggagacctcacaatcatggcggaaggcaaaggaggagcaaagtcacatcttacatggcagcagacaagagagcatgtgctggggaactcctctttaaaaaagccatcagatcttgtgagacttattcactattatgagaacagcctgggaaagacccaccccgatgattcagttacctctcactgggtctctgccacaacacatgggaattatgagagctacaagtcaagatgagatttgagtggggacacagccaaaccatatcagtaccttttcattttcattttagatttattactgtccatgtctgtctgattccctattcagaccaagagctctctgaagatagaaatcctgttcctttttgttcactgataaatttttgacagttagcacagggactggcattatagtggatgctgcttatgaagtagtcagagagaatccaagcacctttctgttaccaggttcagaattcctctaccagacttagaattcctctgctgacattatgttgcaggaaaatacaataccaatataagggagtatgcattaaacttttcaaagtttaattgtgtgggttcctcccctccacaaccccccacatttttccagatttttttttttaactgagggtatgagcaaactttcaaacagaaaaatgttaaaggtcataaataatttaaaaaaactaatccgagcaagacttgggtagtatcatggtttttcattgaaggaaaaaagcttagagtctgttctttaaaaagtgtgttttaaggatagcatttataaaagtaaaattgaggacatacagtaaaacccaaatctctttactttaattcagtttactttcactgttgcagtatatcattataaaaaggtctttgatcaattagatatacttcttttttatttgcataaatttaaaatttgagttaaacaagtagaaaaagacaggagacagtttgccgagatttttttcagagataatgtggctgtcttttgtggctctggttctaggcagtatgaaactgtggttccacttgaagattctattgtgactgaggttacagcaactctacaagaatgggcaagtttgtggaaacagttgtatgtggtaagtagttgattactggtttattggatcattaaagtttagtgtaccaagtaaaaatattaaactatgctaagtatgcattttagatttctgaatatttgcagtttatcaaacatatgttcttaatatttactgaaacatagcagactgagttttttcaacctgaggagaacacattattattcatatgcctgtagtttctctcctccagtcactggaatatgttacataacaccagggatcttagctgtcttactcattgttgtgtccccagatgctttataaaacagatatttacagaacaaatgaaccaacttgagacttacttatttttatcttttgtgaacccagtggtgggtataaaggccgataaattgtgttaacagtttttaacagctactaagcttcaaggatatgtcatatctgacactttgctggcccaaaaaattaatagaaaatctaataaaagccaggcatgatggctcacacctgtaatcccagtgctttgggaagctgaggcaggaggactgcttaaggccaggagtttgaaaccaccgtgggggccaccatctctgcacaaaataaaaaatttagttgggtgtggtggtgtgtgcctgtagtcctagctacttgggaggctaaagagtgagaccttgtctcttaaaaaaaaaaaagtaatagtaacctaataaaaaaagtaataaacttctcaggaaacttagaaagtagagagtgataagatgtagaaataatcataatatctacactaaaagtaagtgacagggtttgggctctggacgatatggagtaaacacattttactttacttctactaatcacaacaaaaagccctgggtaaaacacataattcacctactggaaaactctgaaagtcagaaaaaagagaatgaactaccaagggatttgggggctcaaggatcaaatgaattctctctctctctctttttttctcctttctgtaccttcatatatcctgacctggtctctagagaggcacacaacttggaaatgctagtgggtagaaaccaacaaacaaaagaaaattagtgccaaggaaagcctgttctctctagccaaaggatagccccaaaagacagaaacttttagtaatactttactgttctctaagagaacagcacaataaaagctgtatttctctcctaccctaacaggcatttcagcagtggaatccataaccagtactgttttatacatacatcctccccctcctacagtaacaaggggatgcccctctccagtggagtctgtagaatgaactggaaaaatctggaaaaatgtaggggtgggtggcagggaggaacccagaaaattaaactttcaccccctaccctatagtaatgaagtggtgccccacctcagtggaatatgaagtaaggaggaggtaactttccatggagaaacctgtggttggaactcttgatttctactttccttgttgtactctccccagctgagcctgtgggaagactctgacttccaccctcccttccccgctgcattggtgaggcagaccctgtgggatagtaccctgtcttccatccttgccctgctaaaatgaggcagtgcttgtccccacccaaactcaaactgaggagatagtagggtgaagttacgtcatctacataacacaaatgagggaaatcagaaaagcactgcagagatttttgtaactggattgatgttcaaccacagcccataaagatgagaaggttgcagttttaagcaggttgactacttgctaaaatagatgatttaaataggaaccggagtgtcatagtataataatgttcaggatatggcccaaaattacttgtcatatgaaaaatcaggaaaatagaaactcaacagatgccaatattgagatgacacagatgtggaatgattgacaaagacttttaaacagcttttgtaaaaatgcttcaacaagcaattacaaacactcttgaaacaaacaaaaacatagacgaccttaggaacaaagtagaaactataaagaaccaaatgaaaatgatagaactgaaatctataataaccaaaattaaaaaaatattatatgggctcaatagcagcctatagaaattatagagaaatgaacaggtcaatttgaagatagctcactagaaattctccaatacaaataatggagagaaaaatagaaaaaatgagctctgcttccagagacctgtggaacaataacgtaagatgtaacactgtagcctcagaatactagatagagaggacaggatgtggagccaaaaaaaaaatttttttttttttaagaaataatggctgaaattttccagtttggcggaagacataagtgttttacattcgggaagcttagtgaactccaaatgggaaaaccccaaagaaatctatactcagacacatcatagtccaaattctgaaaattaaagccaaagaagaaatcttgaaggtagctagaggacattaacacattagctgtgtcagcaatttgagtaacaggtttctcatcagaaagtatggcagacaggaagtatcccatcatttttcaactgcttaaagaaaaaaacaaaacagattaccctgaattgtgtatgcagcaaaaatatgcttcaagaatgaagggataatcaacccatatcagaaggaggaaagctaagaaaatttgttgacagcagattggttctaaaagaatgactataaaggaagttgttcagaaagaaagggagtgataacaggatgcttggaacattaggaatgaagaaagcaatggaaagggtagattaattatctcttctgtttttaaaattatgtttgataatacaaagcaaaaattataatgttgatacagttctcagtgtatgttgaattaatatttaagaaaactgttggctgggtgtggtggctcatgcctgtaatcccagcactttgggaggccgaggtgggtagatcacctgaggtcaggagtttaagactagcctggccaatgtggtgaaaccctgtctctactaaaaatagaaaaattagctagacatggtggtgcatgcttgtattcccagctacatgggaggctgaaacaggagtatcacttgaacctgggaggcggaggtttcagtaagccaagattgtgccattgcactccagcctgggcgatgagagcaaaactccatctaaaaaaaaaaaaaaaaaaaaaatttataaagtggagagggaaaaggacataaattataatagggtaactacattccattttaagtattaaaacattcggctgggcacggtggctcacgcctgtaatcccagcactttgggaggccgaggcgggcagatcacgaggtcaggagattgagaccatcctagctaagacggtgagaccctgtctctactaaaaatacaaaaaaattagccgggcgtggtggtgggtgtctgtattcccaagctactcgagaggctgaggcaggagaatggcatgaacccggaaggcagagcttgcagtgagcagagatgacgccagtgcactccagcctgggtgacagagcgagactctgtctcgaaaaacaacaacagcagcaatgaaaaattaatactggtaggctgagcagctacatatgtatattgcaatctctagagcaatcattaaaatattaaagtgatataataaaaagtactgtaaaatcaaaatagaacactaaaaatgttaaagtaacctacagaaaaataagaaaggggaaatagaggcaggtaaaatagagggagcaaacacaaaagtaaataccaaaatggcagacttaaatcctaatatatgagtgattacaagatagagtttagcagaattgtacaattaaaaaaaaactatatgttgtttatatgaaactcacttcaaactcacttgtctatatgatgatgtagggaggctaaaggttacagatagaaaaatatatactatgcaaacattaatagaagaaaaacagggtaattatgttaataacatgtcattatattatgaatactttttccttaaataaatattaattatactaatatcagaaaaattcaatatcagagcaaagaaaactaccagggaaaaagggacattataaaatgatagaaggatcagttcactgggaagacaaaataatcttaatctaacagaggtgcaaaataaataaagcaaaacctgaaagaactgaatggagaaaagagaaaaaagtcactgttatggttggggattaataacgcattctcttagtaatccgtataaccactaggcaatagtcatcaggaatagagaagaactgaacagtgcaatcaaccataggctctaattgaaatttatagaatacttaataaaatcaggatacagattcttttcagtcaaacatgttcattcaccaagatagacaatatcttagttcatagaacaaattcgacaagtttgtaataattgaagtcatacaaaggatattctaaccataatggaaacaaattaaaaatcactaacaagaaaaaaagaaaacaagaaaacctgaaaaattaacccactactaaatgatctgtgtcaaagaggaaactgtaagagaaataaaagctatatcaaaatgaatttaaatgaaaatatattaaaatttgtgggatactgcaaaagcattgttgaaagggaaatgtatgctttaagtcctaataataggaaaaaaagcaaggtttcaaatcaatgattgcagctcctgctctactgtaagaaactaaaaaaggactccagcctggacatcacagtgagactctgtaaaaaaaaaataataataataatccaaagcaagcagaatgaaggaaaaaatgaagagcagaaattaatgaaatttaaaaaatagaaaagcaatagggaaaatcaaagcaaaaactggtttataaaagattaataaaattgataaacacctaccaaaactggaaaaagaaaatgaggggaaaatactaattaccaatttatcaagagttaaagaaaggagatatcaccacagacattaagcaggnnnnnnnnnnnnnnnnnnnnatatcaccacagacattaagcaggcaaaaagaaaatactgtaaacaactttacatacatgatagtttaagatgaataggtcaaattctagaaaaccataaattgtcaaaactcacccaagtacaaaatagataatctgaaaatcctgcaactgttaacataattgaatttataattaaaatccttccaaaaagaactatccaggcaaataaataacactagttttatacagagtcttctagaaaatggatgaggagggaatacttcctaattcatcttatgaggctgctattaccttgatatcaaaattagacaaagacagtacaaaaagaaaaaaatctggagtatctcttatgtttgtgactatagacacaaacatcctcaataaggtattaacaacttgatcaatatataaaaataataatataccatggccagtggggtttattctggtaatacaaggatggttcagtatttgaaaatcaattagtataatccattatattaacattctaaagaagaaaaaccacttgatgacattagttgattcaggaaagtattttagaaaattcagcacccattcatgataacaactctcagtaaactaacagtagaagcaaacttcctcagcttgataaaggatatttataaaaacccacagcaaatgtggtaatgatgatagacagtctgcttttgtgaacaaggcaaggatgttagctctcaacactcctatcaacacaatattagaagatttaaccaatggagtaaagcaagaaaacgagagatatacagatagaaaggaataaataaaactcttcctgtttgcagattatatggttggctgcataggagatctcaaggaatcaacaaacaagaagacactagagtttgaaaagaaaccttttagaattaataaacaagtttgtggttgcagatatccaaacacatacccacagacacacacatacacacacaaacacacacacatacacacacaaacacacacacacattcatatttccacaaataacaatgaataattgaaaactaaaatttagaacacagtaccatttattagttgctcaagaaaaaatgaggccaggcacagtgtctcatgcttgtcagtactttgggaggctgaggcaggaagactgcttgagcccaggagtttgagatcagcctgggcaacatagcaagatcccatttctaccaaaaaaaaaaaaaaaaggaagaaggaaaacaaagaaacacttgggcataaatccaacagaacatgcacaagatctgtatattgaaaactgcaaaatgctaattaaaaaagacctaagtaatggagaggcagtatgctcacggattagaaaagacatattaaaaatatttgttctatccagactgttgatctgtatatttaatgtaattcctaaaacattcctggcaggattcttttagatatagacaagctgattctaaaatttatagggaaagttgaaattatttttttaaattaaaaataaaatttctaggggaatgcaaaagaactaaaacggttaaacaattttgaaaagaataataaagttggaagaatcactcgatctaattttaacacttactgtacagtaatcaaggcagagtggtactggcagagggatagacacttaaagggaccaagatagagcctgagatgtagattcacacaggtatgcacaactgatttttgacaaaggtacaaaagcagttaagtagaggaacgatagtcttttcagcaaatggtgttggaatagttggatattcataggcaaaaggaaaaaaaaaccctgcctaagtatcatcctttttataaaaagttaactcaaaatggattataggctcaaatgtaacatgtaaaactaaaactttcggaagaaaattttaggagaaaacgttcatgacctagtcttaagtggagacatgacactaaaggaaatgatccatagagtaaaaaggcaatacattggacttctatcaaaaccaaaatttttgttcttgaatgaccctgttaaaaggatgaaaaggtaagccatatactggaagaaaatatttgaaaattatatatccatcaaaagatttgtatctagaatatttatggaactctgtaaatggaacagcaatacaacaactcagttgttgttgttgggcaaaatacttgaatagggacaaggaggatatgtggctagccagtaagcacatgaaaagatttttctacatcattagccaatagagtaatgcaaataattgctacaatgagatactaatatatacctgttagaatgactgaaataaaaattactgctaataccaagtgatgccaaggatgtggatctgcatctctcatacattgctggttagaatgtaaaatggcacacccacttggagaaaaatttggacttttcttataaagttaaacatatacttaatatatgacccagccatcacattcctgtgtttttaccctacagaagtgaaagcttctgttcacataatagcttttacatggatgtttataaaaagctttatttctaatagcataaactggaagcaatccaaatatccttcagtaggtgcatagaagaaaaaactgtggactactactcagaaacaaaaaggagtaaatgattaatacatccagcaacttagagtgattgatctcaagggcatgatgctacttaaaaaaatgtaccttcaaagggttgcatactctatgattccatttatatgacattctcatagtgacaaaattatagcaattaagacagatttgtgtttgccaagagctaaggttgaggtcagagtgtgactgttaaggcttaatatgagagagtgtctttatggtgatggcacagttctgagttctgattgtggtgatagctatttgaatttacacatgtggtttctttgtaatggagttaataatattgtaacaatgtcagtttcttggttttgacagtgtactgtggttatataagatcttatcaatggatgaagctgggtaaatggtatatggaattctctgtatgtttttggcaagtcctggtgaatatcagagtcatacacaccagaggtttaaaaaggaatgtttgccagttattcagtaatttaggacaaaaattgtcaatatgattgacattttcttcctgatatcacattccatatgaacaaagttaaattttaagcttcatagaaacaaatagcttatttgtgacatagatggtcacaaaaatttttgttaaaactaaaatattttactaataaaaacaataatggttttagacatttttagcatcaattatgctattatgctattatgaatagctattatgctatgctattatttatgcatgagattttaattattattggcagtgttaactaaattgactccaaaaacagtaatgtaaatttgaagaatcctttttggtattaatgtatacagtacatttttggatttgatgttaatgctacagagttaacataagagggtctgaatttacttaacttggctgtagtttagaaactgataactgcagaatcaataactgattactctaaagtcaaataaattattctaaaagagattaactaattttgttactgtgaatgtgaatattaaaggagaagcaatttttttttgcttttggaaagcttttaggtatgtttcaaataactttcatatgttagtctactttttcaactacaaattttttgaaatctaaacatagatcaaatatttgtgatgaaaatttagcatttgaagtgagatgtgctgtaagtataaaatacatgctggagttttgagacttagtacaaggaaatgagtggaaaatattccattaataatttgttatgttgattatatgtggaaatggtgatattttgtatatattaggtacataaaatgtatcagtaacatttaagaaacatgctgtatgttaagaacatacttaactgtttagcccataaaggaaaataatttctaaaaattagaataaataaaatccctaggggaaggtatttagcaacttaaaaaaataatgctaaaggtgaaagtatggggatcattaaaagattagtggttaccaggggttggtgggtaaatgggaatggatgaataggcagaccacagaggatttttagggcagtgaaagtactctggtgaatctctgttttgtaaatatctacattgatgcactgtttgcagtagcaaaaataaattttgtttctctaaatattaaagctatggtccaattaagacattgacgattagtgcttacatgtgaagagccattaaaaaaatttaaatagtacgttatataataaagtgaaaatttatgtacagattatatgtaaagtataattttacctgtattctgaaaacatatttggaaaatgattaagacaatgtaccaaaatattaatggagattacttaaggggctaaggtgttagatgttttctttttcttatctattttcaaagttctcagttgtgaatatatattattttaattgttatgaaaaataaaacttttatttaaataacgaacacagtggatgatactgtagaaacatataatcagtattaagtggttaagtagtgtatacaagtgtttaaggtaagggattatactacttaatttgctacgtttaccttttatcacattatcagcaagtgtttattcaattctttggtggttttgtggactagaagagggctttagatctgggctggaatctgggtctatccacttctatgataggctcattattaggtgttagtttcttatgctataaatggatgttataaacttatttcaaagagttgttagagatgaaatgaaaaaacatataaatcttcaagtggtcaatgaatatgtgttgcattattctgtttttnnnnnnnnnnnnnnnnnnnnnnnnnnnnnnnnnnnnnnnnnnnnnnnnnnnnnnnnnnnnnnnnnnnnnnnnnnnnnnnnnnnnnnnnnnnnnnnnnnnnnnnnnnnnnnnnnnnnnnnnnnnnnnnnnnnnnnnnnnnnnnnnnnnnnnnnnnnnnnnnnnnnnnnnnnnnnnnnnnnnnnnnnnnnnnnnnnnnnnnnnnnnnnnctaggtccctttgtctcttaggttaagtcagtgttgctttaattcttggtaaacttcctcatttggtgaagcactttccccgtagcttcctaaaaaaaaaaaaaaaaaaaaaaaaagagtttgtgggagaatttttatttttgaagttttacatatttaaaatgtatttagcttacccttacctttgattgatagcttggctggatatatacttctttgttacaaataagatgaaaaatttttaaagcattggttcattattttctagcttccagtattgttgttgagatgttccatgtcttgtcccaatgcccttctagttcctgatccttttattgacaagttgttttttatgaaaaatttagtagtatctctttgccccagtgttctgaaattttacaatgatttgctgtagattattttcactgataatgctggctaatcagccaattcttttagcctaaaagctaatttctttcaattctaggacattttgtttgtatttcattttttgatatttccctcctctttgttttcacagttctgtcttcctagaaccctttgattagagttggacatcttcaaatgattcactaattttcttacattttgtctcccatttatctattggattgcattaccttttcattctgctttcaggcaggattcctcaattttgtgttccattattttactgttttttaatattaaattacgactagcctgcttttaacttccaaaagcccttttgggttttgggggttatgcccctttattatgccctattcttctttggatggatgtgctataatttctgtggtcttgtaaaatattaattattttttctttgaaattttcttttattcttgtcattgtgtctgtttcctccaatatctatttttctgattgctttggtctctttccttcatgttggaagctttccttattatatggtgttctttgtccattcatatttaagaatgaggcattaaaatgttgacagaaagctctgtgaattgggctagtatttatcaattagtgaacattactttagagggattagaagagggcctggcttttgatggaaaaagtagagcagctgtcaatatttctggatcttttcccctgggctgagttttcctaaagaggaatcttctccattcttcatatgcaggtatcagcctggttgttaacatctggggagctcgatgtggaaagcacactgggaaagggttgggggtaaagggggataatacttctaggcttcagagatttctggtacctccagtcccagagcctttctgcagaggcttgcatcttactgatttcttccctgtttcccaccctcctcacttgtcttcctccaccttactcttagggcttttttagttttctattctttgacaagtcatctactttccagctttcacctttaatgtttggtggagtggatagttgtgcatgggaaggattgaggctggctttttattagtctccctaagaagagatgcctatggacacatcgaggactgactttaagtagagatttgatctgtcctgtgtagtaggagtgactgtgagcctgagaacgcctcagctgtttactgcccactgttaggtaagtctgccttgttcagaattgtgaatggatgcccttcacttggcatctatccatccgtgaatggatgacttcagcaactacagcctccattgtcatatctctaatatttttttctacctttctacctttggtgttgttcctttcttatgaagatctgctctgtggaatagaaagatttttacaaatcttagctctcctgcaaatatatgtgttgtaagagaggattagagctataatgctatttgttatttggaatatcaactctataatggaggatgtatttgggctggggatagactgaggatgatatcatggcccttgagatgtggaggagttagatgtatgtgccaaggaaatacatattgtatggatacttcctcatattaatgaagagaaaaagaattttcatatcgcttctttgcattttcatttgttgtaaatatgtgcttgaaaatcagtgtgaattagctttggtttagatactgttttgtttcacaaaaatttctatcttttgtactcagttgctgactatgttgttcggcaaactaaaatgaaagtttagattcctgggtttaaaggtattttattattattatttttattttatttattttttgagacggagtctcgctctgttccccaggctggaatgcagtggcacaatctcggctcactgcaagctctgccttccaggttcacaccattctcctgcctctgcctcccgagtaactgggactacaggtgcccgccaccatggctggctaattttttgtatttttagtagagacgaggtttcacagtgttagccaggatggtctcgatctcctgacctcgtgatccacccacctcagcttcccaaagtgctgggattacaggcgtgagccactgtgcctggccatttaaaggtatttttgacataaaggtcattagggttcccaagtacttgtagtctagaaatcttttcttatattgggatgagttttggaatataagaaaacatctannnnnnnnnnnnnnnnnnnnnnnnnnnnnnnnnnnnnnnnnnnnnnnnnnnnnnnnnnnnnnnnnnnnnnnnnnnnnnnnnnnnnnnnnnnnnnnnnnnnnnnnnnnnnnnnnnnnnnnnnnnnnnnnnnnnnnnnnnnnnnnnnnnnnnnnnnnnnnnnnnnnnnnnnnnnnnnnnnnnnnnnnnnnnnnnnnnnnnnnnnnnnnnnnnnnnnnnnnnnnnnnnnnnnnnnnnnnnnnnnnnnnnnnnnnnnnnnnnnnnnnnnnnnnnnnnnnnnnnnnnnnnnnnnnnnnnnnnnnnnnnnnnnnnnnnnnnnnnnnnnnnnnnnnnnnnnnnnnnnnnnnnnnnnnnnnnnnnnnnnnnnnnnnnnnnnnnnnnnnnnnnnnnnnnnnnnnnnnnnnnnnnnnnnnnnnnnnnnnnnnnnnnnnnnnnnnnnnnnnnnnnnnnnnnnnnnnnnnnnnnnnnnnnnnnnnnnnnnnnnnnnnnnnnnnnnnnnnnnnnnnnnnnnnnnnnnnnnnnnnnnnnnnnnnnnnnnnnnnnnnnnnnnnnnnnnnnnnnnnnnnnnnnnnnnnnnnnnnnnnnnnnnnnnnnnnnnnnnnnnnnnnnnnnnnnnnnnnnnnnnnnnnnnnnnnnnnnnnnnnnnnnnnnnnnnnnnnnnnnnnnnnnnnnnnnnnnnnnnnnnnnnnnnnnnnnnnnnnnnnnnnnnnnnnnnnnnnnnnnnnnnnnnnnnnnnnnnnnnnnnnnnnnnnnnnnnnnnnnnnnnnnnnnnnnnnnnnnnnnnnnnnnnnnnnnnnnnnnnnnnnnnnnnnnnnnnnnnnnnnnnnnnnnnnnnnnnnnnnnnnnnnnnnnnnnnnnnnnnnnnnnnnnnnnnnnnnnnnnnnnnnnnnnnnnnnnnnnnnnnnnnnnnnnnnnnnnnnnnnnnnnnnnnnnnnnnnnnnnnnnnnnnnnnnnnnnnnnnnnnnnnnnnnnnnnnnnnnnnnnnnnnnnnnnnnnnnnnnnnnnnnnnnnnnnnnnnnnnnnnnnnnnnnnnnnnnnnnnnnnnnnnnnnnnnnnnnnnnnnnnnnnnnnnnnnnnnnnnnnnnnnnnnnnnnnnnnnnnnnnnnnnnnnnnnnnnnnnnnnnnnnnnnnnnnnnnnnnnnnnnnnnnnnnnnnnnnnnnnnnnnnnnnnnnnnnnnnnnnnnnnnnnnnnnnnnnnnnnnnnnnnnnnnnnnnnnnnnnnnnnnnnnnnnnnnnnnnnnnnnnnnnnnnnnnnnnnnnnnnnnnnnnnnnnnnnnnnnnnnnnnnnnnnnnnnnnnnnnnnnnnnnnnnnnnnnnnnnnnnnnnnnnnnnnnnnnnnnnnnnnnnnnnnnnnnnnnnnnnnnnnnnnnnnnnnnnnnnnnnnnnnnnnnnnnnnnnnnnnnnnnnnnnnnnnnnnnnnnnnnnnnnnnnnnnnnnnnnnnnnnnnnnnnnnnnnnnnnnnnnnnnnnnnnnnnnnnnnnnnnnnnnnnnnnnnnnnnnnnnnnnnnnnnnnnnnnnnnnnnnnnnnnnnnnnnnnnnnnnnnnnnnnnnnnnnnnnnnnnnnnnnnnnnnnnnnnnnnnnnnnnnnnnnnnnnnnnnnnnnnnnnnnnnnnnnnnnnnnnnnnnnnnnnnnnnnnnnnnnnnnnnnnnnnnnnnnnnnnnnnnnnnnnnnnnnnnnnnnnnnnnnnnnnnnnnnnnnnnnnnnnnnnnnnnnnnnnnnnnnnnnnnnnnnnnnnnnnnnnnnnnnnnnnnnnnnnnnnnnnnnnnnnnnnnnnnnnnnnnnnnnnnnnnnnnnnnnnnnnnnnnnnnnnnnnnnnnnnnnnnnnnnnnnnnnnnnnnnnnnnnnnnnnnnnnnnnnnnnnnnnnnnnnnnnnnnnnnnnnnnnnnnnnnnnnnnnnnnnnnnnnnnnnnnnnnnnnnnnnnnnnnnnnnnnnnnnnnnnnnnnnnnnnnnnnnnnnnnnnnnnnnnnnnnnnnnnnnnnnnnnnnnnnnnnnnnnnnnnnnnnnnnnnnnnnnnnnnnnnnnnnnnnnnnnnnnnnnnnnnnnnnnnnnnnnnnnnnnnnnnnnnnnnnnnnnnnnnnnnnnnnnnnnnnnnnnnnnnnnnnnnnnnnnnnnnnnnnnnnnnnnnnnnnnnnnnnnnnnnnnnnnnnnnnnnnnnnnnnnnnnnnnnnnnnnnnnnnnnnnnnnnnnnnnnnnnnnnnnnnnnnnnnnnnnnnnnnnnnnnnnnnnnnnnnnnnnnnnnnnnnnnnnnnnnnnnnnnnnnnnnnnnnnnnnnnnnnnnnnnnnnnnnnnnnnnnnnnnnnnnnnnnnnnnnnnnnnnnnnnnnnnnnnnnnnnnnnnnnnnnnnnnnnnnnnnnnnnnnnnnnnnnnnnnnnnnnnnnnnnnnnnnnnnnnnnnnnnnnnnnnnnnnnnnnnnnnnnnnnnnnnnnnnnnnnnnnnnnnnnnnnnnnnnnnnnnnnnnnnnnnnnnnnnnnnnnnnnnnnnnnnnnnnnnnnnnnnnnnnnnnnnnnnnnnnnnnnnnnnnnnnnnnnnnnnnnnnnnnnnnnnnnnnnnnnnnnnnnnnnnnnnnnnnnnnnnnnnnnnnnnctattcactccccagctgatgatattgctttttatttctctgagaataaagcagtcagaggaaaattttagttctcttattaccagatctaccagctacctgtatcattacccatattctgtacccttcctctctgtgaagaataggtaggtaacacagagtatcaagcctcctacctaaatcaaaccctccccttttttccccaggatccatctgttcatgtctactcaaggatttaacagctgcatcatcaaattttctccctctaatagattattctcttcaaaatttagtttgaaattttgtcaaatcttttaaaaacccttccttaaccacacagtcacattctgctaccccatttctctgcttttagttactgcagattcttcagaagagttgtctgtgctctttctccacttcttcctctcacaatctcactcaaactcactccaacaattcattgaacctgcacattgtgcacatgtaccctaaaacttaaagtataataataataaaataaaataagacatctattgcatataaaaaaaaaaagaaactgttcctgtagaggtcagtgacagccaccacaatgccaaatcccctggccaattctcagttcatatttatttaaccccccagtgcctttgacaaagtcctccttaaaatccagttttctaaaattttctcccattctgtaggttgcctgttcactctgatggtagtttcttttgctgtgcaaaagctctttagtttaattagatcccatttgtcaattttggcttctgttgccattgcttttggtgttttatacgtgaagtccttgcccatgcctgtgtcctgaatggtactgcctaggctttcttctagggtttttatggttttaggtcaacacttaagtctttaatccatcttgaattaatttttgtataaggtgtaaggaagggatccagtttcagctttctacatattgctagccagttttcccagcaccatttattaaatagggaatcctttccccatttcttgtttttgtcaggtttgtcaaagatcagatggttgtagataagcagcattatttctgagggctctgttctgttccattggtctatatctctgttttggtaccagtaccatgctgttttggttactgtagccttgtagtatagtttgaagtcaagggctaatatccagaatctacagtgaactcaaacaaatttacaagaaaaaaacaaacaaccctatcaacaagtgggcaaaggatatgaacagacacttctcaaaagaagacatttatgcagccaacagacacatgaaaaaatgctcttcatcactggccatcagagaaatgcaaatcaaaaccacaatgagataccatctcacaccagttagaatggcgatcattaaaaagtcaggaaacaacaggtgctggagaggatgtggagaaataggaacacttttacactgttggtggcactgtaaactagttcaaccattgtggaagtcagtgtggcgattcctcagggatctagaacttgaaataccatttgacccagccatcccattactgtatatatacccaaaggattataaatcatgctgctataaagacacatacacacgtgtgtttattgcggcactattcacaatagcaaagacttggaaccaacccaaatgtccaacagtgatagactggattaagaaaatgtggcacatatacaccattgaatacaatgcagccataaaaaatgatgagttcatgtcctttgtagggacatggatgaagctgggaaccaccattctcagcaaactattgcaaggacaaaaaaccaaacaccgcatgttctcactcatagatgggaattgaacaatgagaacacatcgacataggaaggggaacatcacacaccggggcctgatgtggggtggggagaggggggagggatagcatttggagatatacctaacattaaatgacaagttactgggtacagcacaccaacatggcagatgtatacatatgtaattaacctgcacgttgtgaacatgtaccctaaaacttaaagtataataaaaaaaaaagccatgaaaagaaaaatccagttttcatttggctttcatgacacatactctcctgcttttcctctcacctcactgcttactccttctagtttcctctgctaaatacttctcactttcctaacctctgaatgttggaaatcagtgtcagacttagcatgtccaaaattaaacttagtttccttcttccaggcatgctttccaggccacaaaacaagagtgatactttactctgttcataacccacatctagtccgtcagcaaattctggcacctctacctacaaaacatgtcaaaacttcaagcccttcttaacatcagcattcttaccttcatccaagcagctgttatgctgtgaactgttgcactaaatagcctcctgactggaatccctgccttcctctttgcctttttatggtttatcttcaatagagcactcagagtgatgctttcgagacttaagtcatatcacatcactcttctgctccaaatctccagtaacttcccatcttgcttagaataaaagccaaagccttaaggtggtttacaaaatctgtgtttaacctggtgcctgctgcctgtctgcatcatcaatcttccctttctcaagacacactgaccctgtatttcctgaacatgccatgtttacttccacctcaaggcctttgcacttgtttcttatgcctgaataatgtccccagttttcttaaatgttgccaccttacttcattcaggtgtattctcaaagttcagctcccaaaaagtctttccctgaccactccacctaaagcagtaccttccccagtgccccagccagcctacccttggccactctgatttttctttttataatttatcaccatcattaatgatttgcctattgcctgctctctagatcaaaagtgccatgagagcagggacttttgatcacaacaaagtgttagtactcaagaggtgctgcacaagcatttgttaattggatgaatgaatgaatgcttgtggatgtatacatgcaatggactatcatataggctttgatgggaaaataataattcaaactttctgttttatacttaaacaggtgattttgttttatcaatatgaaacgtatgtgttggaaacaaatatcacattgcctttatggcttaatcgtcaagattccaattttccagatggtatagtttgcttgggctttgctggtttttgagctggcaggaatttgtgagttctcacctttttccagcattgtgtaccatcaggatgcttaacttttcttcatcagttcatcgattaaagaaaggagaagttagagtatatgattcctaacatcttctagttaaaaataatttctctttaagatgaatctttaaaagtctaatggggccaggtgtggtggctcatgtctctaatcccagcactttagggggctgaagcaagaggattacttggacctgagagtttgagatcagcctgggcaacatatcaagactctatcaaaaaaaaaaaatattagccaggcctgtaatccgagccactcaggaggctgagttgaggggattgctcaagcccaggagttggagactgcagtgagctgattatattactgcactccaacctgggagagagtgagatcctgtctcttaatagaaaaaagtcacattagatgatttctaagtagtatgatattctgaatgttttagttataagatcactgccacctcaaaacactacctgattctactgttttgtgatttgctgtatagctaattttatttatagcttctttgacttgagcttattttggcaaacatcttttttagggtaaatctcatacagatattttactaacatcttaatctgccttcagaagcattatttatagatcagttacatcccaagaattttaattatacagaaaccaaaatattctaaaatcaagatttcacatatcagcaaataggacttgagtttttaaactcatacattatttttaagtacatcttttttctgaagcatctattctcatgacacttatatttttctacttttaaggttaaaactactaccaggtccataattaagtttgttaagatgtttccgtttaactcttacaaaggtgacaatttttattaaactgaaaagactggaaatctgtctacaccaggagggagtcggggaaggacacaccgtttagaaaagctaattagaaaatcagatgaggcctagaaatcaggagtgaatttcactccagggactgtggctttatattgaaacattagttgcttcaaaatagggcaaatgattcttcctctcccaacttggatatctctcctggagaaaccagagttattgctggatggttgaaatttttgcttttatgtgaactgcaacttctgtgagggaaagcagctctgggctcctgtgtaacattctgttctaagtttagtaactttgatttactaaagaaatgaataatctaggatgtggtagagataaatgctacttttgcatgatccaaatcaattatgttactttgttggatgtcactacgtagagatttttggatagaaggaggtaatgactttcagactttaaaattaagttcctctttatattaccttagtagttcagagaaatgagcacttttcatagtttaactatttctctttttcttttcattccttttccatgtctcttgtatttcacccaacaccaaaaatgccctttcagaaacacaaagtagatcttttctacaaactacgccatgtgatgaatgaacttattgacctgcgaaggcagctactgtctggtcacctgactcaggatcaggtgcgggaggttaagcggcacatcaccgtgcgcctggactggggtaatgagtaagtatgaaaattgtttgggtatctctcagtttcatttatgataactcagtcttcagggagtttgcacctatacaaagcttctctttaatgattcaaaggcaatgttatattcttcactaagctttcatcatttttgctaggagcagttatttgtcctagttagcgaaggatactcactggttctagttgctgaacctcttttagcctctgtttttgcttctgaaaagaagaggtaaataataggactagattatcctataaagttaaatttctttgacctcagatttcttgattctacacctcctaatcagaatacacttgaaaatatattttagtgctttcttcaaatgtgaatttagtgtccttcacattttatagccatacaatgaatctgaatgagcataacctacaaatggaaactgtctacatttgtacttcagaatatttttgactaccttgtcattcagtaatagtcttgcatttatgtaataactatgatttgctattgccatacaagtacaatttgaagactttggtatgggaagttagggtataattttcagtgaatataattgatatatcaataattgatataataattaatataactttataattgatataaatttcaggtgcttttgtctcattctcttaaaattgggtccattgaacttttaagtgaccaggttgcctcctacttaaaatatacatataccttaagtatatttatatgtgtgtctttagctccttatcctttttgggaggggcccaccaataaatgaaatctatgagcccatttctggaagccagaaagtagatgaaagattaatgacagagtaaatccattatatgtggaggaaaccttagttaatgagagagtcagtctgccccacagctcccagaatcatagaaggtgggataggtcttgaagctttgaaaaggacttggcttaaaagagtgtctaaggaacagtctaccccaatcaatgagcagaaannnnnnnnnnnnnnnnnnnnnnnnnnnnnnnnnnnnnnnnnnnnnnnnnnnnnnnnnnnnnnnnnnnnnnnnnnnnnnnnnnnnnnnnnnnnnnnnnnnnnnnnnnnnnnnnnnnnnnnnnnnnnnnnnnnnnnnnnnnnnnnnnnnnnnnnnnnnnnnnnnnnnnnnnnnnnnnnnnnnnnnnnnnnnnnnnnnnnnnnnnnnnnnnnnnnnnnnnnnnnnnnnnnnnnnnnnnnnnnnnnnnnnnnnnnnnnnnnnnnnnnnnnnnnnnnnnnnnnnnnnnnnnnnnnnnnnnnnnnnnnnnnnnnnnnnnnnnnnnnnnnnnnnnnnnnnnnnnnnnnnnnnnnnnnnnnnnnnnnnnnnnnnnnnnnnnnnnnnnnnnnnnnnnnnnnnnnnnnnnnnnnnnnnnnnnnnnnnnnnnnnnnnnnnnnnnnnnnnnnnnnnnnnnnnnnnnnnnnnnnnnnnnnnnnnnnnnnnnnnnnnnnnnnnnnnnnnnnnnnnnnnnnnnnnnnnnnnnnnnnnnnnnnnnnnnnnnnnnnnnnnnnnnnnnnnnnnnnnnnnnnnnnnnnnnnnnnnnnnnnnnnnnnnnnnnnnnnnnnnnnnnnnnnnnnnnnnnnnnnnnnnnnnnnnnnnnnnnnnnnnnnnnnnnnnnnnnnnnnnnnnnnnnnnnnnnnnnnnnnnnnnnnnnnnnnnnnnnnnnnnnnnnnnnnnnnnnnnnnnnnnnnnnnnnnnnnnnnnnnnnnnnnnnnnnnnnnnnnnnnnnnnnnnnnnnnnnnnnnnnnnnnnnnnnnnnnnnnnnnnnnnnnnnnnnnnnnnnnnnnnnnnnnnnnnnnnnnnnnnnnnnnnnnnnnnnnnnnnnnnnnnnnnnnnnnnnnnnnnnnnnnnnnnnnnnnnnnnnnnnnnnnnnnnnnnnnnnnnnnnnnnnnnnnnnnnnnnnnnnnnnnnnnnnnnnnnnnnnnnnnnnnnnnnnnnnnnnnnnnnnnnnnnnnnnnnnnnnnnnnnnnnnnnnnnnnnnnnnnnnnnnnnnnnnnnnnnnnnnnnnnnnnnnnnnnnnnnnnnnnnnnnnnnnnnnnnnnnnnnnnnnnnnnnnnnnnnnnnnnnnnnnnnnnnnnnnnnnnnnnnnnnnnnnnnnnnnnnnnnnnnnnnnnnnnnnnnnnnnnnnnnnnnnnnnnnnnnnnnnnnnnnnnnnnnnnnnnnnnnnnnnnnnnnnnnnnnnnnnnnnnnnnnnnnnnnnnnnnnnnnnnnnnnnnnnnnnnnnnnnnnnnnnnnnnnnnnnnnnnnnnnnnnnnnnnnnnnnnnnnnnnnnnnnnnnnnnnnnnnnnnnnnnnnnnnnnnnnnnnnnnnnnnnnnnnnnnnnnnnnnnnnnnnnnnnnnnnnnnnnnnnnnnnnnnnnnnnnnnnnnnnnnnnnnnnnnnnnnnnnnnnnnnnnnnnnnnnnnnnnnnnnnnnnnnnnnnnnnnnnnnnnnnnnnnnnnnnnnnnnnnnnnnnnnnnnnnnnnnnnnnnnnnnnnnnnnnnnnnnnnnnnnnnnnnnnnnnnnnnnnnnnnnnnnnnnnnnnnnnnnnnnnnnnnnnnnnnnnnnnnnnnnnnnnnnnnnnnnnnnnnnnnnnnnnnnnnnnnnnnnnnnnnnnnnnnnnnnnnnnnnnnnnnnnnnnnnnnnnnnnnnnnnnnnnnnnnnnnnnnnnnnnnnnnnnnnnnnnnnnnnnnnnnnnnnnnnnnnnnnnnnnnnnnnnnnnnnnnnnnnnnnnnnnnnnnnnnnnnnnnnnnnnnnnnnnnnnnnnnnnnnnnnnnnnnnnnnnnnnnnnnnnnnnnnnnnnnnnnnnnnnnnnnnnnnnnnnnnnnnnnnnnnnnnnnnnnnnnnnnnnnnnnnnnnnnnnnnnnnnnnnnnnnnnnnnnnnnnnnnnnnnnnnnnnnnnnnnnnnnnnnnnnnnnnnnnnnnnnnnnnnnnnnnnnnnnnnnnnnnnnnnnnnnnnnnnnnnnnnnnnnnnnnnnnnnnnnnnnnnnnnnnnnnnnnnnnnnnnnnnnnnnnnnnnnnnnnnnnnnnnnnnnnnnnnnnnnnnnnnnnnnnnnnnnnnnnnnnnnnnnnnnnnnnnnnnnnnnnnnnnnnnnnnnnnnnnnnnnnnnnnnnnnnnnnnnnnnnnnnnnnnnnnnnnnnnnnnnnnnnnnnnnnnnnnnnnnnnnnnnnnnnnnnnnnnnnnnnnnnnnnnnnnnnnnnnnnnnnnnnnnnnnnnnnnnnnnnnnnnnnnnnnnnnnnnnnnnnnnnnnnnnnnnnnnnnnnnnnnnnnnnnnnnnnnnnnnnnnnnnnnnnnnnnnnnnnnnnnnnnnnnnnnnnnnnnnnnnnnnnnnnnnnnnnnnnnnnnnnnnnnnnnnnnnnnnnnnnnnnnnnnnnnnnnnnnnnnnnnnnnnnnnnnnnnnnnnnnnnnnnnnnnnnnnnnnnnnnnnnnnnnnnnnnnnnnnnnnnnnnnnnnnnnnnnnnnnnnnnnnnnnnnnnnnnnnnnnnnnnnnnnnnnnnnnnnnnnnnnnnnnnnnnnnnnnnnnnnnnnnnnnnnnnnnnnnnnnnnnnnnnnnnnnnnnnnnnnnnnnnnnnnnnnnnnnnnnnnnnnnnnnnnnnnnnnnnnnnnnnnnnnnnnnnnnnnnnnnnnnnnnnnnnnnnnnnnnnnnnnnnnnnnnnnnnnnnnnnnnnnnnnnnnnnnnnnnnnnnnnnnnnnnnnnnnnnnnnnnnnnnnnnnnnnnnnnnnnncctgtctctactaaaatacaaaaattagccgggcgtggtggcgggcgcctgtagtcccagctactcgggagggtgaggcaggagaatggtgtgaacccaggaggcggagcttgcagtgagccgaggttgcgccactgcactccagcctgggcgacagagcgagactccgtctgaaaaaaaaaaaaaaaaaaaaaaggaagaagaagaaatgctgctatgcctttctaggacaagagctctgtttacccattgaggaaacctaggctcaaaggcacttttcccagcgttgtatggtggaagggtagagctggtatttgtacctagaactgatcccaaagcccatgtgctttatgcagaaccttatcatctatctaattatgtgtgagtcttaaaaccaggcacattattgccagtatttttagtcattaagctatttgatctttgttctgttctgcaagtgtgaatactattacatccctgtgatgtatatctgagtaatattcagttagaacttccaaggataggaactgaactggtcctgtaatctttcatttagagttttaatttagtcaggagctctccacatctagataacaattttttattttgtttcctgagattaggaattatttatttggcctacaatttgaatattcagacattaaacttatgtgacttaaaattattggcctaaaatttgaatattcagacattaaacttatgtgacttaaacttattggcctatatgtagatactccataagtaaaaattattaaattgtatcagatagaaaccgcactttctacattgtgctctttatatttttaggaactgcaatacaagaagggcagaaagttgtgttcaaattaactagtcatcatctttgctcaagtgtcttacatagagaattagtcagttaattatatctactccaaattttaaaataatttctctagtgatgtaattttaatttaacttaatattttcaacatcttctctaaagatgctaagtttcttctgtctctaatttcatcactacagtagctagctaggttaaaattgcattaaccgagaactgacatagcctaattgatctctgccttggaaaaatacctaagaaatattttattcttagaataataatttaacaaatcatacatatgtgtgtgtatatatgtgtgtatatatgtgtgtatatatatgtgtgtatatgtgtgtgtgtgtgtatatatatatataaatttctggttcttttattctttctttctctccgtctgtcattttttcttcctcctccccttttctactttctcatatttttacatattctaacccatctatatctctttcttcccacttagtttatgtctctcatcaagggaattgatttggagtaagatacacaagcagtagtttagtttgttatatgcagaaaatatcccccagtgagtttcctcttaagtagatttttagccaggatctagaaaggtttatggcttagtactttacccttaaggactcactgatattttccagcgttaggacacctgaaattagcagaagttttcaatgatttcacagttaacggttcttcccgtacctggtggtgtgctcactgatcagtgtcttgccctgttcacagtctgggatgtcttggctatgtttaaagtatgtatggtcaaagtcctgtcaagtttatgttcaatcgactgactaacacacactgttacacagacactcttttggcattttttgcttatcattataacctgcactcagcacttggtaggcactatgtgaacgtatttgagtaataaagtggatttgttttcatgcctggtggacactcattaatcaattgatatttgtttccttctggtttgatgtttgacacagaatcatctttcaaacagttatgactaaattgattttacaactacttgtagccattattacttattataactttcacagttatttttaaaaagacaggtataatggaaataccataggttcagaatgagaacaacctagcttgagacaagcccagctcaactcctttaacaggccactcagttaacctcagtgggcctcagcttccttggttaaaaaatggatctaatactgtctacttcccaaagtgcttagagatgatgtacataaagtgcctagcccaagtaaatgtttggtaaaaggtagtaattactaattatatatttttatatgttatataaatgtaaatatgctgtgttttcattagtatagttcttatctgtatgctgtttttactataagcattagaaaagggcattgctccacaagaaatcttaacatctccatcttttctcagctgatactgggtccccatcccctgggctgcggacccctgttagaaactgggctgcacatcaggaggtgagctgccggtgagccagtattactacctgagctccacctcctctcaaatcagtgtgaaccctgttatagtgaactgtaatgcgagagatctaggttgtgcactccttatgagaatctaatgcgtgatgatctgaggtggaacagtttcatcctgaaactatcctaacccctgcaccctccccccgatccgtggaaaaattgtcttccatgaaaccagtccctggtgcaaaaaagattggggaccactgccttaaagtatccattgtatataattaattaacttcagattattttctatattctgtggttcagatggggaaaggaaaaagataaaatagaacatagaatagagagtatagagcatttaaaagaaatagagattcagggtctcagagagctccatctgaaagaatattgggtcaggattatgtcccttattagctgctgtgtccctaggttgaacatgagcttagcacagaataggttctaatatatatttgttgaattattggagtgaatgaatgaatgatcaatgatgggtgagagaagaccaagtatttttgtgaagactgtttacctaaacaattggtaggaccatttgtgaaaacttagctctgtgctacatctgtatgtagatatacatagatgtttgccccctgcttgtgttcatctgtttaaagagttttttatccagacaccatacttctttgatcacaatccctataactctaagctaacattttggctagcaatgtaacatggggataataattaaaataacagtagcaatttacaatgccaggtactgtgctgggtcctttatgtggattaatccttacaacagcttacgatagtagattttagacagtgtggtttggtggtatacccaagatacagaccagccgatctgacatcagaacccatgctccttaatactgtaatacaatgcatcttttgctgtgaagatagagatcatgttgaccattccctgcattcgatgttcactattcttcgagtaaaccataggaaaaaatagccaggagcctctttttgagagtgaagtttgtagtgaacatgtattggttctcactgtccaacatctctgcctttttcaaatgaggacagacactaatataacttttgcaaactaccctttatccattaaagatagtcttagtaggaggaactctttttggtttttaccagatcacccattaattattctcttatttctcaagataatgaaattacaaaactaaaagatactgtgctctggttacttctaggagagggaaaacactctgctctcaagagaggattaacatgaagaatatgaacacttgcatgactcaaagctactgtattctttatgtctaacaccattggtaggatacatgatagttcctcaaagttctgtggggtggataaatatttatatgggagggcggctgactgtacaagcaagctgagcttgccatgatgctaactaagatagagttcttataatgccagtctccacacatggccatcactgtgtggtgcactaccacagaggagcacatacactcaattccagacctaatgacttaaatgtcatctggatatttcttaaactgttgtttctaatacaatttttttttttgagatggggtcttgctctgtcatccagacgggagtgtggtggcatgatttttagctcactgcaaccaccgcctcctggtttcaagtgattctcatgcctcagcctcccaagtagcagggattacggacacccaccaccacacccagctaatttttgtgtttttagtagagatggggtttaaccatgatgaccaggtcagtcttgaactctgacctcaggtgatccacccacctcagcctcccaaagtgctggaattataggcctgagccatggcgctcagctgaaaacatttttgtttgagacagggtctctctctgtccctgaagcccgagtgaagtgacacaataataatgcactacagcctcaaactcctggctcaagtgatcctcctgcctcagcctcctgagtagctgggactgcagtcacatgccatcacaacctggctaattttttttttttttttttagagatggggtctcactgagttgcccaggctggtctcaaattcctgatctcaagcagtcctcgctccctgacttcctaaaagtctgggattataggcatgagctaccgcacctagccataaaaacacctattttgattatattatttactcattcttttttgttgttgttgtttcctaattgtaggctagttcacatatgtttatagatctcaaatgattaaagaatatgtatgaaatgttgtctcttcattttttattattttaaaaagtttaatgtgactacagaaaatttggaaagtgttttacatattactatttcagttttctgatacaaatgctaatatcattcttgtgatctttccattgtttttccatatctctataaaagtattttaaatatttgaaattatatctgcaaaattatctttataatgtcagttgctttttataagaaggggttagaaaggatgtactgcacctcgctcttgcactccgtgaacactactgcctttgcatgctctaagtgttagaagccggaggcctgaaattgtttcagttaagtgaagaatagctaataagaggtgatggaatggagtgtttctttgatataagaagtcgggatcccaattgtagaaaaatacagtttcatagatttaaatgcattaacttcaattggcatagttttatcattaaattgtaaaccatcatggataaggccaacagtttattactgatcttctcattatgtaaaactgtgggttatttttagcatttggttcaaaaattttttctctttaaaaactcatttttttaattagtggataatagaaaaaaacactaattgaaaaacataagtttttaacctttaataggaaaatgttttttctttttttcttgcctgctagaaagtatacatataaattttaattcttaatcctagtaaccattttagcctatgctgttagtacatttgcttctataatactttctccatataggtttgattttccatttttattttatcaatcttactgcaatgtaattttatcagatattttcctataaacagggtataaattgtaaatgaatctgaattttggatgtgcacctgattttattttcaatgatgagttttatgcacagagcttatagatttagctgtgctagcatgttctaaaatagttcatagtctaattgaagagaaaaaagaatctttcttctctataatcccatggaatgcttttgccagacacaagaattcataacccttgttttggatagggtggtcacagagcatctccaaaattctgatgagagttacagacactctcctcagaaaaaatttataatgaacacacacacaaactcatccgtgtcataagcagtttcagaggtctacaaccctataaactccattgaattcctggtttagagctgttgtcttagagtgcaagaaaagagctaacgtttattgaccataaattacataccattttgaacccaagtgctgactgtgtccagagttatttccactgcctaatactgccattaccatcacttcttcttactgccccaaagatcctccaaatactgttgtcttgagtagtaatacttgttggttaaacttttatctaatgtttcttaaaatattggtgctaatacatatctaggtctttaccagtatcagtattagttaaattgaaaatgagatgaaactcagccaaattatacatctctttgaacacatggacatggggaagggaacaacacaaattggggcctatctgggggtgtggtgaggggagggagagaattaggaaaaatagctaatacattctgggcttaatttctaggtggtgggttgtgaggtgcagcaaaccaccatggcacacgttcacctgtgtaacaaacctgcacatcctgcgtaacaaacctgcacatcctgcacatgtaccccagaacttaaaaataaaaaattaaataaatgaataaagagaaaaagatacatctctttgcatttagtaacttttaagaggtgaattttatgtgtttgactttgaattacaccctgaagatttttttcatcctaatgaaactaatgcataactaaaccttgagcatagctgtcagatggggagaaatagaaaaataaacatgactttttaatgatgtaaagaaaacctatccttaatgaactcaagcatgctgatataatgtaatactgaatgaaacctttttaccatcatgagtggaactgcctgaactggaattgtgtcaacttaaatccctagcctcatttacccagaagtgaacagaattagttgttgctgtataaagacatgttcctgctaggacagtgtctgatcctctgtccacaagatgtggcaggtatgggttcccaggcacataaagagagataagtaatctgagtacatggcatactgagtgtggtctttctctttactagacatttgggcctggacctggtgcctcggaaggactttgaagtagtggactcggaccagattagtgtctcagatctctataagatggtaagaaatctaacatgaggtagcttgttcctgcatacctcattttttctcttttgtttattttctctaatgttatgaaacaacattgctaaaaatttgttttggcctctttcccagtgtatttaagtgatattctggccatatctgtcacactagctttccaaataggattccattgtagtaaactacagatactgggcttaccaaattatctaggcattacttctttgttgactttcttggtgaaccagagctccttcagcctgcagcataactaaagttatgtctctttcctctcacctctttaaaagagaaagtagttaaagctggaaagagccaattattaggtaatatagaaattgagcctggaaataatgtactagtctttctagagagacagagcctgatagattcttagctatctgttggttattacaaaaatatgttgggtcgactaatcaagattacatttatagtctagatgcaaagtaaataaatgaagggtacaatattttaaagtaaaataaatagaagaaaccttaggtggtgacagttatgcttagactaacagactggataaaaactcattttgaagagtatgtatttgatgagtatatattggtgagatttataagttttagagtctgtttaataaactgtaatatttttagggagcttagagggtaccaagtatgttgcctggacaaggacctaaggaaatttgcctaagtaatatgcaaataacatatcaattgcttctgcacatttgtttgtgtgtacttactagcatacccaagcaattgtgttcagttgctttaactatgctgtatgcagtacaataggttgataagtgtgagatatagagattaaagatagctggatgtggtggcatgcacctgtaggtacagccagctacttggaaggctgaagtgataggatcgcttgagctcaggattttgagagcagcttggacaacatagtgagacccatctatttaaaaaataaaaagtatgaacaagacttatctattccctaaagaatctcactatctagggtattggttcctaatcccttttgggtcatagaagatcaggtgaaattttctcccaggacaatgcaagtatgctttgcatacaaagttttataatcagttttagagaattgatggatagtttctcctgatgcttgctctgaagcccatgcatggaccctatgttagaaactctactctagtggaatcaatagaccacagtcaaacagttgccatacgtgtgctgcatatatgtgctgtgtagcataatttaagtatacaatgatgctcttagaggtagtgactggtttcctgggagtaggaaaagagaaggaaagacattccaaaaaggcacacagcatatggaagtggcagttccaggaaactataagacatttcataacttcggcatagagtaccactaactcatgttagtgagtgggagtgaggccaaggaggaggcaaaagtcagaccatgaagagctttgtatttctcaaattagagtctatcgagtagtctgaaagaagcatgagagtgacataagcagatactggtttcaaacattgactctgtctagagagaatataaaatgcaaaagactggaatgagggaggaaagagacccagagtagtgattcaggtaagaaaaatggctagacagcaatggacaagaaatacaataagaatgtagatgtttggaattaaaattgataaattttgatgatcaattagatatggaaagtgaagagagaatgagagtttgaaactaagaattccccttggaatactggcttggaggatgctgttttcttggtaaagattttggattttattcttagtgtgacagtaagcttgtgaaggtaaattgagcaggagaatcacatgatcagctttacatttttaaaagatgcctttgcttgctgtgtggaaaaggattggagtggggcaagaatagaagtagagaagagtcattcaagcaggagaacttaatttcagtagcttgagctagagctggaagagtgaaactagtaagaagttgttggattctgaatatattttgaagttagaaccatagttgtagatagattaaattgccatgtgtgtttgtagatagattaaattgccatgtgtgtatacaagaaagagaaaggtcagaaaagaattatacctgtgtttttgacctgcctaattatataaaagtgaaatgggaaaccttgtggaagaagcagtttggagagtgaagcagtaaggatctatagctgtgattttcttttcacgtttgggattccttttagacatcccaccagagatgctgaaagtctagagctcataaatgaagttcagataaaacagttttagaggcatcatattacatatggtatataaggctctaggactgaattagataaccacctccttgcccagaccttcatacagtgaaacccagtggccatacagcacttccagacaaccaagcatcaatagacaaagctctcacataatgttcactatttgggcgatgggtacacttagaagcccggacctcacaattttgcaatatccatacaacaaatctgaatcttgaaaaaagagagagacagagagagagaccaaaatgaacaacatacggaaggaacttggaagaaagagacagcccagcagaagaaaatggtgattgctgtctgcagagagaaattaggaaacaattaggaaacagagtacaacaatccaaagagctttacaaaattaaaaagcagattactggaatacacttggaataaaggttagaaaatagagaaaaatctccctgaaaacagaacagcaacaaaataaagtaacagtaggagagaaaacgtttaaaagtttagaggttcaattcaggaagcccagtattcagaagagagaataaagaaacaaagaaagaaaattactgaaggaatcatattaaaaactttctcagaacatggatatgagtctccagatttaaagggcccaatgtaattatgaaatttcagctcactagagatggagatgagcttaaaacttccaaagaacaaaatggatcacatacaaaggatttgttgtaggaaaaacatttggcttcctaatagcagcattaaaaattagaaataagagcattaccttcaaaattctgagggaatataacattcaacccagaattctatatttactcagccacattataaatcaagtgggagagtagcctaaagaaaattttggtcactcagagtctcaaaacaacaataataacaatgctctttaactccttttcaggaaactactgaagagtaagttattccttctaaaatgaaggagtaaatcaaaaggtctactgtgtgttatccaggaaagggattctgacacaatgaaagccctctttatttcattttctgctaaatttcctgtctttttatctcatgtatttgctttttcatacaattagatatgataaaaaacaattataagagtccacacatttattaaaaaccacttaggatttatatgttaaattgcacagtaaatgttttggttaaatcttaaaagatcaagattcaaaagaatatccttttagattttgtgttaacatgtaaatctattactggaaattatgaagactttatatgaaactttctgattataatacttcttgtcattgattttagggaaaaaatcctgtatgaataagattatacttaaagtttgcactcatagcattttttaaataaaaaatgaagcctccatgcaaatgttgaatgataatgattgataaaagtctctttaaatacacagttggattttgcattctttttatttgtttgttttattttgtttgtttgttttgagacagagtctgtctttgttgccatggctggagtgcagtggtgtgatctgggctcactgcaaccaccacctcctgggctccagcaatcttcccaccttaacctcctaagtagctgggagtataggtgcatgccaccacactcagctaatttttattttattattattatttttattttttcggtagagatgagatttcgccatgttgcccaggctagtcttcaactcctgggctcaagcgatcctcccaccttggcctcccaaaatgctgggattacaggcctgaaccaccatacttagcaggattttgcattctttatgatgaaaaccagaggaagtccttagtgctcttcaattctgcatcataacaactctaaatccattttaaacaatagagaattggtgctgcgaaaatataaagtatttcaaaagacaccacaaactatttgtgttaatcttagccatgcatctttgtgaaatgtgacactcaaaaattacataatatgagagtttctaaactgtggcaagatctaacagaatgcttgcattatagccccctgcttcattattatccatccacattatcatgtattgggatttgtgtttgcctgttgtcttcttgtgtcaattaatatttttaatagctcaatgtttatacattcatttctggaataaatcagtcaattagattatttactaaaaatcagtaattgtatatgcttcatcctttcatagattctgactagatatgccttatatttccttgtaagactcacaatatttaacacaatccccaacctatatagcaggcaattaattttgttattcagttggttaacatatccaaagctgcatagtttctttccatattgctagacttttgtagaccaaatgaacaagagactttacagggctgaaaatgatttctctactggagaaaaactggcagaggcagtaatgtgttccatgcatttcttaattaatttatatttttgacatacattgctaggcacttgtagtataaagataaataagacagtgttttgctccctggaagtgcaaagtctagagttacgtagcaaacatggaaacaatgcattacaaccctaatagaggtgatgattacactgaaaagggaggtattggctgaccagctgaagtctggttgacaagagtgccctgaaagaggttccagaatgccagttctgatgcctttctctggctgcccatgtggtatgctttcagactaaatcattctctcaaaatttaatgactgaaataaaaaaattacttattattgtcaacagggatgtttcatactgaaattagctgcttcataaaatccttctgtatatagttctaattgaaaatttatgactaccaagattagtagtccttttaattggttaacagtaaatctacttgagaaaaatggcttagtgtagctcctggatataaaataaaacaacggaatttattttagtctagtaaccttccagtgagatatggtcagtaaaccacagaaaacctgatttgtttttgaatgcttgaatttttttttttttttacttttttgaaacctgttttatatgtgaatttttcttttgtgcatatacattctatatgatgttttgcccagctggtggagacttgatttttatatttcatatatatcatggggacatatatttcccatgaatgaacattaatactcaataataattagttaatattgctaatatacacgtggatatttagtaataagcaaatatagctggtcagacacatttaaattaatatttaattgtacttctcttttatatagggttaaatatatgtgtttggaaaagaaatggaaacttccactgccacaaccattcttcttacccatgtgatatggagcaattcaacaaatgagtgtggtaccatacctctagggtccaaaaggaagcaggatgaaatctctcattgtttcgtttaccaacaccacgcactgaacatttgtaaattcaccattattcctggccagggtttacttctaaatgtgaatgactttctataataactaattataaaaaataacaattatactaataataaaaataccaattttgaataataattatcagccacttacagtatgataggtaatatgctgagtcagtctgctcaaactctgtgaggttgagttaggcataaaattttatagtcacttttcagatgatgaatacacagatataagtgtgagtcaagattcaaaactaggccggtcatggtggctcacgcctgtaatcccagcactttgggaggccaagacagacagatcacgaggtcaggagattgagaccatcctggctaacacggtgaaaccccatctgtactaaaaatacaaaaaaattagctgggcgtggtggcgggcacctgtagtcccagctactcgggaggctgaggcaggagaatggcgtgaacctgggtggtggagcttgcagtgagcctagatcgcgccactggaatctagcctgggcgacagagcaagactctgtctcaaaaaaaaaaaaaaaaaaattcgaaactggagggttgcagggggtggtatcaagatggctgagtagaggcacctggcacttgccttctactcagtgagtaattaactacatattgaatagagcatctaagacagaatactggagttcatcagggaagtgacaagaaacttcagagtcatggaaggagagggaagcaaagcagccagcccacccaggataagcttggagctagaaggaactccccattgtggagaaaaggcattgttccagagagagagtttgggccgggcctcacactacctctgagattccacagaggtaccacagagacaccacagcacagtgtcattttgagagcctagctcccaccagactgcgtttttctacccttgggtccaacacacccgaatctccacacccctggagccctgctgacatccccctatgtccattcagagggctgcagcatcacaatacatactggacccagcattgttcctgggtctccagcgctttagcccacacagtgacttataccctggggaatgggtggtgcagtgcacctaggagactgcccccatgacaaagaaagctaaaacttgtgctccctagaacctgagagctgcatgtctggggctactgccactgatagcaaccctgctccctccagtggcagagccactgcatacctgcacacattcaacacattcaagaggcctgggggactggttcacctgtgtgcattgtcccgggacctgaggaccaatctgccccatacactgccatgggcacataagtgcatagtccaaggaactcacctgtcaccaccagtacccacacataccttccaggacctgggtattgactagcattcctcctgccaccagcacctgtgtttaccacctgggggccagaggacagacctataggataggtctgtgggtaggcccacagctgttgtccccatgtgccatccagggtgatcagcctggtgaaactgccctagctgttgcctgtgtactaagggacctgagaggtggcacaccactgctactgccattgccagtgccatgtgtacaaccacggggcctgagtacccacttgatcattatcactagcacccaagcatgctgcctggaggcccaaggactgaccttccaccatggggtcccacatataccacctggggacctaaggaccagcccatctgatcttcttgttcctagctaagcctcaccacagcatctactaacaaccacagtctaagtcactgcagaactcacagacaccactgacactgattatagctgaagaaatcatatggagagtctgctactgcactcacctagaatcaaatccaaagcaccctacctaacactaaatatacatctataggaaaaagtctttccctatgtaaaccaatctataaaattagaacaagcagctgttacactggatgcccacatatcaatgtaaggacacaagaaacataaaaaagcaaagatacatgacacttccaaacaaagacaataattctctagtaacagatcccatagaaaagaaaatgaatgaaatccctgaaaaataattcaaaataagattaaagaagctcagtgagatacaagagaacacagataaacaataaaaaatcagaaaagcaattcatgagttgaagtttaacaaagagatatgcatcatagaaaggaaccaaacagaaatcctggaactgaagctttagtgaatgaaagaaaaaatacagtcaagagcttcaacaatagatgaaatcaagcaaaagaaagactttctggccaagcgcagtggctcatgactataatcccagcactttaggaggccaaggcaggtggatcacctgaggccaagagttcgagaccagcctgaccaacatggtgaaaccttgtctctactaaaaatagaaaaaattaaccaggcatggtgatgtgcacctgtaggcccagctacttgggagactgaggcaggagaatcacttgaacccaggaggcgaaggttgcagtgagccaagatcacaccactgtactccagcctgggcgacagagcgagactccatctcaaataaataaataaataaataaaagagtttctgaatctgaagacaggttttttgacatcaatcagatgaaaagaaaaaagagtaaagaaagcttatgtgacatacagggtaccagaagcaaataaatattcaaattttggcagtttcacaaggagaaggcatgggcaaagatatagaaaacctgctaatgagataatagctgaaaacttcacaagtcttgcaagagataaagacatccaaatacagaaagctcaaatatccccaaatagatgtaatctaataagattttaaaggtatatatatataatcaaactattaaaaatcaaagacaaataattctaaaaacagttaaaagcatcatgtcacatataagggaatctccaccagactaatagcacatttctcagcagaaaccttctagaccaggagagaatgggatgacagattcaaagttctggggtaagggattggtgggggcatgaggggaattgtcagccaagaatactatacccaacaaagctatccttaaatggaggttacataaaatctttctagacaagcaaaaactgagggaattcatcaccactggaccagtcctacaagaaatgtttcagggatttctgtatctggaagcgaaaggacaatgtctaccatcatgaaaacacacaaaagtataaagcttactggtagcatacatatacaaatgagaaaggagttaaacattaccatcataaaaaaaccaccaaatcttaaaggcaaacaagaaacaaggaagaaagaaatgaagaatgtattaaacaatcacaaaataattaacaaaacaacaggagtgagtccttacctgttactaacaaccttgaatatgaactgtttaaattctccaattaaaaaatatagactgcctgaattgattttaaaaatcaagacccaactatatgttctctacaagaaactcagtttacctataacgacacacatagactgaaagtgaagggatggaaaaaaaattccatgcaaatagaaacctaaagcatgcaataatagctatacttatatcagagaaaatggactttacatcaaaaaacataaaaatagataaggtcattatgtaatgataaagggatcaattcagcaagaggatataacagttgtaaatatatgtgcatccaataccacagcacccagatatataagcaaatactatcagagcaaaagagttcaacagaccccaatgcattaatagttggggacttcagcattacactttcagcactggacagattatccagacagaaagtcaacaaacatcaggcttactctgttctatagaacaaacgtacttaacagacattacaaaatatttcattcaacagtatagagcacatatttttctcatcagcacatggaacatactccaggatacagcacatattaggccacaaacaagtctcaacaaattttgaaaaatcaaaatcatgtcaagtatcttctcagaccacagggaaataaaactagaaatcaataaaaagaggaactttgtaaactgtataaacacatggaaattaaacagcatgctcctgaataagcaatgagtgaatgaacaaattaaaaaggaaattaaaaacttgcttgaaacaagtgaaaatggaaacacaacatatccaaattctgtgagatatggcaaaagcagtactaagagggaagtttacagtaataaatacctacataaaaattggaaagatttcaaataaacaacctaatggtgtgccttaaggaccccaaaaaaggaaaaacaaactaaacctaaagttagtagaaataagtaataaagatcagagcagaactaaacaaaatagagctgaaaaaaacaatacaaaggatcagcgaaacaaaaagttggttttctgaaaagataaaatcgataaaccactagactaatcgagaaaaaagaaggtccatgctgagaccggttcagtcagggataccctaacccagtgacactagaggaattaaagacacacacacagaaatatagaggtgtggagtgggaaatcaggagtctcacagccttcagagctgagagcctcaaacagagatttacccatgtatttcttaacagcaagccagtgataagcattgtttctatagattatagattaactaaaagtattccttacgggaaacaaagggatgggccaaaataaagggatgggtttggctagttatctgcagcaggagcatgtccttaaggcacagatcgctcatgctattgtttgtgatataagaacacctttaagtggttttccaccctggatgggccaggtgttccttgccctcattctagtaaacccacaaccttccagtgtgggcatcatggccatcatgaacatgtcgcagtgctgcacagattttgtttatggccagttttggggccagtttatggccagattttagggtgttcccagcagtccaaaataaagtcagaaacaaaaaaggatacattgtggctgatgccacagaagtacacaggatcagccagcatggtggctcactcctggagtcccagcactttgggaggccaaggcaggtggatcacctgaggtcaggagttcaagaccagactggccaacatggcaaaaccccatgtctactaaaaatacaaaaattagctgatcatggtggcacatatctgtaatcccagctactcaggaggctgaggcaggagaatcacctgaacccaggaggtggaggttgcagtgagccaagattctgccactgcactccagcctgggcgacagagtgagactcatcccaaaaacaaaacaaaacaaaacaaggaatcattagagactactatgaacaattatatgcaaacatattggaaaacctagaggaaatggattaattcctggacacacacaatctaccaagattgagtcatgaagaaatgaaatgcttgaatagaccagtaacaagaaaagagatcaaatcagtaataaaaagtcattcagcaaagaaaaccccagaactgtatggctctactgctgaattctaccaaacttataaggaagaactaacacaagctcttttcaaactgttccaaaaaattgaggcagagagaattcatcctaactcattctatgagaccagcgttacacattacactgatagtaagtcagacaaggacacaagaaaaaaaagatgggccagtatccttgatgaacacaataaatacagacacaaaaatcctcagcaaaatactagcaaattgaatccaacaacatgtcaaaaagattataaaccataatcaaatggaatttatcccagtgatgcaagcgtggttcaacatgtgcaaatcaatcagtgtgatacatcacattgacagaatgaaggacaaaaacaatatgatcatctcgatagtcacagaaaaagcatttgataaaatttaacatcttttcctgttaaaaactctcaacaagttagacatggaaggaaaatacctcagcataaaagctgtatatgacacatccacagctgacatcatactgaatgaggaaaagctgaaatactttcctctaagactggaacaagacaaagatacccacttttaattctcctattcaacatagtacttgaagtcctagccagagcaatcaagcaagagaaagaaataaaaggcatttaaattggaaaggtagaagtcaaattgttcctctttgtagatgatataatcttatatatagaaaaacctaaagactactaaaaatctcttagaactgatatactgatatacttagaactcttatacactgttggtgggaatgtaaattagtacagccactatggaaaacagtatgagacttcccaaaaaacaaaacagaaccaccatttgatccagcagtcctactactggatatttatcaaaaagaaagaaaaatcagtatataaatgagacaccagcacccttgtgtttattgcagcactgttcacaatagccaagatatagaattaatctaagtgtttgttaacagatgaaaggatgaagaaaatgtggcatatatgcacaatggaatactattctgccataaaaagaatgaaatactgtcatttgtagcagcatggatggaactagaggtcaatatgttaaatgaaataagccgggcacagaaagacaaatatctcatgttctatcatatgtaggggctaaaaaacaaaaacaaaaacaaaaaaatgtgcatctcttggagatagggaataaaaaagtggttaccaaaggttgagaatcgtggggtggtggggttgaagagaggttgctcagcaaatacaaacatctagttagaaggaataagttctcgtgtttgatagcacagtggggtgagtgtagttaacagtaatttattctacatttcaaagtagctagaagagaagatttgaaatgttcccaacagaaagaaatgataaatgtttgaggcaatgaatattctaaataccctgatttgataattatacattgtatgcatgtatcaaaatatcacatgtacttcataaatattttaaaatattatgtatcaatttaaacatttttaaaaaattgaaaacctaggattctcacttctgcacttaggtccctaacttctatatcatagtgatgctcatgtaatttgagcttcacaataactttgtaaggaagataatacaggctcttatctgaattttatgttcaggaaaaatgtctcctggagagattaagtgatttgtctgaaatttcacagtctttgagtggcaaagcttgaattagaatctgcttcttctcatttcagccagccagcagtaaaggaacagcatggggaagtgtttgggagggagccctttattgttaaaggcatcattgtggaaagtctgaagaagctggatcaggcagctcagaaagtggtacagtatatggagaggacagtggcaaagcaaaaatttagtaccaggcaccgacttgtgacttgtctgttagtcagatctggaagggctcaggtttgaatctggattttgccactttcttgctatgtgaccttcagcaaattacgtccatactctaagccttagttgtctccaccaaatacgaataacacttattttacaaagttatcagaattaaatgagatcatgaatataaaaggcatagcagactgcccagcatatagaaagttcttaataaaatttagtttctttcccggtagagtttatttttctttccttctttccatagcatttatctagccggcagagtgtacagcaaagcacatcccaggtaagcggctttcctgggtcttccagcctttcccctcaactttttctgttaagagattacaacatatgaatacaccaggaaatgacagacaccactgacttcttgactgtgtggtgtctttatctgaggagctttgacctctaaacagttttggccagactctacttctactgtgcagatttgcataagcacaattaaagcagactgaaactaaaatgaatcagtctgggagaaaataaaaatgttatttagaatggtaactattacgaggtaacagtgtaaatcaagcgcattggggtcataatggcatttctttaaaatgagtttgaaaatggttttccgggctgggcgtggtggctcatgcctgtaatcccagcacattgggaggccaaggcaggtggatcacctgaagtcaggagtttgagaccagcctggtcaacatggtgaaacctactaaaaataaaaaaattagctgggcatgatggtgggtgcctgtaatcccagctactcaggaggctgagggaggagaattgcttgaacccgggagtagagtgcagtgagccgagatcatgctactgcactccagtctgggtgacagagtgagactctgtctcaaaaaaaaaaaaaaaaaaaaaaaggaaaaagaaaatggtttcctggagaattaagatatttgtcacctggtggagatttttagttcacttgtaagttggaattactgtccctatatttcttcactgtttactcctcccagctgcttgcttgcccacctcaacccaagtctgttgatgcagcatcccctacaagcagagaaaacatcttcagtttctcaaataatctccttcagtagtgtgaaaagagtttgtaatttagtttccactttttaatgatcaatataaaaaataactaaaataaaaatcactgggtttttttcttcctcattaggtagatacaatgcgcccacgtcatggggaaacatgtcggatgccagtgccacatcacttcttcctcagcctgaagagtttcacttacaatactattggggaagataccgatgtcttcttttccttatatgacatgagggaaggcaagcagatcaggtgagagtcactggaaattctggtgaggttctatgttaggatggtatgggtcataggcatctctggccatcagagaagacagatgcacagaagaggcaaaacaagataaagtaacctcatctcattagctaggagttttggccccaattccctgtgtgcccttaagtcacgtaaaccataccatgggtggctgccttttttatgactttttccacatagaagctcaaaatcgagtcttggctatcaccacctcacagagagaaaaggatgcatctatttaataccacaaaaaaggcataggagaaacatagaaccaaacaaatgcagcagagacacacagctccagagtgcaggaagccctgggccttggcttgctgcatgtggaagagagggtttgaagaaaaagggggctgatggtgtcttgtctgggcagcccatgaaaggagagcatcttctgagtttcttttatattgcttgggaacttcttgtgttaggagtgctgtatggcttttacttgctttagtacttaaaattcgaaagcagatttttcacttttccaattatatattatatgtgggaaaattagaaatggaagttataacagaatgcaaaagaaaaacagttaatttatatgccccacagtgcctctgatcttgacaaaaatattaatacactatgctttactttggcataggaataaaatgatgcacccattgatcaggacatgtgaattttccttatcaccaatggctcctagtatgtgcccttgggaaagttattgtagagaaggtagtagtggtattgatgaaagctaaaactgttgcatgtaggcaagactacaggccagggctgtgtggatatagattctggctgctcttcttttcctactatccagatgtttgtaaactttatttgtgtgtgtgagagtgtgtatgtgtgtgtaaaaatcctttcttcaagctacattttatgaaaaagtccaatatatgaaacagataaaactattccattattgtggcccaggagcaatggctcacgactgtaatcccaccactttgggaggccgaggagggcgaatcacgaagtcaggagtttgagaccagcctgaccaacatagtgaaaccccatctctaccaaaaatacaaaaaattagctgggcgtggtggcgggctcctgtaagcccagctattcaggaggctgaggcaggaaaatcacttcaacctgggaggcggaggttgcactgagccgggatggtgccactgcactatagcccagctgacagtgtgagacttggtctcaaaaaaaaaaaaaaaaaaaaagatggattgttggcaagatggctgaataggaacagctctggtctgcagctcccagcaagattgatgcagaaggcgggtgatttctgcatttcagccgaggtacccggttcatctcactgggactggttggacagtgggtgcagcccatggagggcaagccgaagcagggtggcgcattgcctcacctgggaagtgcaaggggttggggaattttctcccctacccaaggggagccatgaggtactgagcctgacgaactgtgcactctggcccagatagtgcgcttgtcccatggtctttgcaacccgcagaccaggagattccctctggtgcctaacacatcagagacctgggtttcaagcacaaaactgggtagctgtttgagcaggcaccaaactagctgcaggagtttgtttttttccataacccattggcacctggaacgccagtgatacagaactgttcactcctctggaaaggggtgctgaagccaggaagccaagtggtctggtttggcaggtcccacccccatggagcccagcaaactaaaagattcactggcttgaaattctcactgccagcacagcagcagactgagatcgacctgggatgctcgagcttggttgggggagggacatctgccattactgaggcttgagtaggtggttttatgctcacggtgtaaacaaagccgctgggaagtttgaactgggcggagcccactgcagctcagtaaggctgctgtggccagactgccagatttctcctctctgggcagggcatctctgaaaaaaaggcagcagccccagtcagggacttatagataaaacccccatctccctgggacagagcacctgggggaaggagcagctgtgggcgcagcttcagcagactttagtttccctgcctgatggctctgaagagagcagcggacctcctagcacagcgtttgagctctgctaagggtcagactgcctcctcaagtgggtccctgacccccatatatcctgactgggagacacctcccagtaagggcctacagacaccttatacaagagagctctggctggcatctggcagttgcccctctgggacgaagcttccagacgaaagaacaggcagcaatttaatccatcttgagttaatttttgtataaggtgtaaggaacgggttccgttgcagttttctgcatatggctagccagttttcccgacaccatttattaaatagggaatcatttccccattgcttgtttgtgttaagtttgtcaaagatcaaatggttgtagatgtgtggtgttatttctgaggcctctcttctgttccattggcctatatatccgttttggtaccagtaacacgatgttttggttaccgtagccttgtagtatagtttgaagtcagagagcatgatgcctctggcttggttctttttgcttaggattgtcttggctatgcaggctcttttttggttccatatgaaatttaaagtagttttttctaattctgtgaagaaagtcagtagtagcttgatggggatagcattgaatctataaattacttcaggcagtatggccattttcattatattgattcttcccatccatgagcaaatggaatgtttttccatttgtttgtgtcctctctgatttccttgagcagtggtttgtagttctccatgcagaggtccttcacatcccttgtaagttgtattcctagggattttattgtctttgtagcaattgtgaattggagttcactcgtgattttgctctctgctcatctattattggtgtataggaatgcttgtgatgtttgcacattgattttgtatcctgagactttgctgaagttacttatcagcttaaggagattttgggctgagacgatggggttttctaaatttacaatcatgtcatctgcaaacagagacaatttgacttcctctctttcctttatttctttctcttgcctgattgccctggccagaacttctaatactatgttgaataggagtggtgagagggcatcccttgttcttgtgccagttttcaaagggaatgcttcccagcttttgcccattcagtatgatactggctctgggtttgtcataaatagctcttactattttgagatatgttacatcaatacctagtttgttcagagtttttagcatgaagcagtgtttaattttatcgaaggccttttctgcatctattgagataaacatgtggtttttgtcattggttctgtttatgtgatggattacgtttattgatatgcatatgttgaaccagccttgcctcccagggatgaagccaacttgatcatggtggataagctttttgatatgctgctggagttggttttgccagtattttattgaagatttttgcatcgatgttcatcagggatattggcccgaaattttctttttttgttgtgtctctgccaggttttggtatcaggatgatgctggcctcataaaatgacttagggatgattccctctttttctgtttattggaatagtttcaaaaggaatggtaccagctcctctttgtgtctgtggtagaattcggctgtgaatctctctggtcctgggcttattttggttggtaggctactaattactgcctccatttcagaacttgttgnnnnnnnnnnnnnnnnnnnnnnnnnnnnnnnnnnnnnnnnnnnnnnnnnnnnnnnnnnnnnnnnnnnnnnnnnnnnnnnnnnnnnnnnnnnnnnnnnnnnnnnnnnnnnnnnnnnnnnnnnnnnnnnnnnnnnnnnnnnnnnnnnnnnnnnnnnnnnnnnnnnnnnnnnnnnnnnnnnnnnnnnnnnnnnnnnnnnnnnnnnnnnnnnnnnnnnnnnnnnnnnnnnnnnnnnnnnnnnnnnnnnnnnnnnnnnnnnnnnnnnnnnnnnnnnnnnnnnnnnnnnnnnnnnnnnnnnnnnnnnnnnnnnnnnnnnnnnnnnnnnnnnnnnnnnnnnnnnnnnnnnnnnnnnnnnnnnnnnnnnnnnnnnnnnnnnnnnnnnnnnnnnnnnnnnnnnnnnnnnnnnnnnnnnnnnnnnnnnnnnnnnnnnnnnnnnnnnnnnnnnnnnnnnnnnnnnnnnnnnnnnnnnnnnnnnnnnnnnnnnnnnnnnnnnnnnnnnnnnnnnnnnnnnnnnnnnnnnnnnnnnnnnnnnnnnnnnnnnnnnnnnnnnnnnnnnnnnnnnnnnnnnnnnnnnnnnnnnnnnnnnnnnnnnnnnnnnnnnnnnnnnnnnnnnnnnnnnnnnnnnnnnnnnnnnnnnnnnnnnnnnnnnnnnnnnnnnnnnnnnnnnnnnnnnnnnnnnnnnnnnnnnnnnnnnnnnnnnnnnnnnnnnnnnnnnnnnnnnnnnnnnnnnnnnnnnnnnnnnnnnnnnnnnnnnnnnnnnnnnnnnnnnnnnnnnnnnnnnnnnnnnnnnnnnnnnnnnnnnnnnnnnnnnnnnnnnnnnnnnnnnnnnnnnnnnnnnnnnnnnnnnnnnnnnnnnnnnnnnnnnnnnnnnnnnnnnnnnnnnnnnnnnnnnnnnnnnnnnnnnnnnnnnnnnnnnnnnnnnnnnnnnnnnnnnnnnnnnnnnnnnnnnnnnnnnnnnnnnnnnnnnnnnnnnnnnnnnnnnnnnnnnnnnnnnnnnnnnnnnnnnnnnnnnnnnnnnnnnnnnnnnnnnnnnnnnnnnnnnnnnnnnnnnnnnnnnnnnnnnnnnnnnnnnnnnnnnnnnnnnnnnnnnnnnnnnnnnnnnnnnnnnnnnnnnnnnnnnnnnnnnnnnnnnnnnnnnnnnnnnnnnnnnnnnnnnnnnnnnnnnnnnnnnnnnnnnnnnnnnnnnnnnnnnnnnnnnnnnnnnnnnnnnnnnnnnnnnnnnnnnnnnnnnnnnnnnnnnnnnnnnnnnnnnnnnnnnnnnnnnnnnnnnnnnnnnnnnnnnnnnnnnnnnnnnnnnnnnnnnnnnnnnnnnnnnnnnnnnnnnnnnnnnnnnnnnnnnnnnnnnnnnnnnnnnnnnnnnnnnnnnnnnnnnnnnnnnnnnnnnnnnnnnnnnnnnnnnnnnnnnnnnnnnnnnnnnnnnnnnnnnnnnnnnnnnnnnnnnnnnnnnnnnnnnnnnnnnnnnnnnnnnnnnnnnnnnnnnnnnnnnnnnnnnnnnnnnnnnnnnnnnnnnnnnnnnnnnnnnnnnnnnnnnnnnnnnnnnnnnnnnnnnnnnnnnnnnnnnnnnnnnnnnnnnnnnnnnnnnnnnnnnnnnnnnnnnnnnnnnnnnnnnnnnnnnnnnnnnnnnnnnnnnnnnnnnnnnnnnnnnnnnnnnnnnnnnnnnnnnnnnnnnnnnnnnnnnnnnnnnnnnnnnnnnnnnnnnnnnnnnnnnnnnnnnnnnnnnnnnnnnnnnnnnnnnnnnnnnnnnnnnnnnnnnnnnnnnnnnnnnnnnnnnnnnnnnnnnnnnnnnnnnnnnnnnnnnnnnnnnnnnnnnnnnnnnnnnnnnnnnnnnnnnnnnnnnnnnnnnnnnnnnnnnnnnnnnnnnnnnnnnnnnnnnnnnnnnnnnnnnnnnnnnnnnnnnnnnnnnnnnnnnnnnnnnnnnnnnnnnnnnnnnnnnnnnnnnnnnnnnnnnnnnnnnnntcttttttttttctctaatcttttcttcacactttatttcattaagttgatcttcagtctatgatatcctttcttccacttgatcaattcggctattgatacttgtgtatgcttcacgaagtgaagctgtgctgtgtttttctgccccatcaggtcatttatgttcttctctaaactggttattgtagttagcaattcctctaatctttttcaaggttcttagcttccttgcattgggttagaacatgctcctttagcttggaggagtttgttattacccaccttctgaagcctacttctgtcaattcaccaaactcattctctatccagttttgttgccttgctggtgaggagttgtgatcctttggagaagaggcgttccggtttttggaattttcagcctttttgcactgggttttcctcatcttcgtggatttatctacctttgatctttgatgttggtgacctccggatagggtttctgtgtggacatcctttttgttgacgttgatgctatttctttctgtttgttagctttccaggtctgctggagtttgcaggaggtcctttctagaccctgtttgcctgggtatcaccagcggaagctgcagaacagcaatgttccttcctctggaagcttcgtcccagaggggcacccaccagatgccagccagagctctcctgtatgaggtgtctgtcgacccctgctgggaggtgtctcccagtcaggaggcacagggatcagggacccacttgaggagacagtctgtccctcagcagagctcaagcgctgtgttgggagatccgttgctgtcttcagattcacaggcaggagcatttaagtctgctgaagctgtgcccacagccaccccttcccccaggtgctctgtcccagggagatgggagtttgttctgtaaggccctgactggggttgctgagtttctttcatagatgcccttcccagagtggaggaatctagagaggcagtctggctacagaggctttgaggagcgcagtgggctccacccagttcgaacttccaggtggctttgtttacattgtgacaggaaaactgtctactcaagcctcagtaatggtggctggccctccccttaccaagctccagcatcccaggttgaattcagagtgctctgctggtagcgagaatttcaagtctgtgaatcttagcttccagggctccatgggggtgggatctgctgagctagaccacttggctccctggcttcagtcccctttccaggagagtgaacggttctgtctcacctcactggcgctccaggcgccactggggtatgaaaataaaactcctgcagctagcttggtgtctgcccaaacggccgcctagttttgtgcttgaaatccagggccctggtggcgtaggcacctgagggaatctcctggtctatgagttgcgaagaccgtggggaaagcgtagtatctgggccagagtgcactgtccctcatggcacagtccctcacggctttccttggctaggggagggagttccctgactccttgtgcttccctggtgagccaatgcccaaccctgcttcagctcaccctccatgggctatacccactgtctaaccagccccaatgagatgagctgggtacctcaattggaaatgcagaaatcacctgccttctgcgttgatctcgctgggagctgcagaccagatctgttcctatttgaccatcttgccagccaccgatcggagttttgctctttcgcccagactggagtgcagtgatgcgatctcagctcactgtaacatccgccttccggtttcaagctgttctcctgcctcagcctcccgagcagctgggattacaggtgcccaccaccatgcccatctaatttttgtatttttattagaaatggggtttcaccatgtttgccaggctaatcttgaactcctgacctcgtgatctgcctgccttggcctcccaaaatgttgggattacaggcgtgagccactgtgcctggcccaaagtcccattcttactctcttggagttttttcagcattcaggataccttgcataaactaaactttttcttgaaaatcagttgcttctataattgaaatagagggctctccctgagagtcaagcattctacccaaatgagataatctgcctctgtgaaaatcttaggggaccctggagataaattttattttaaaatgatgggcgagcacttttttattaaagcaaacaattttgtttccctctgcaaaagaggttatgtatgtaatgcagctagagcttatctgcaggatttaggcagtccactaatagacctgcaatttagtcttggtccttcgaccctaggccccatcgtatagtctagcctgtcttaacttggtccaggacatagactccagctcactaaccaacattttcgcaaagattttctgtgagttccagcagaaataagagaggagctggtaccttgtctctggtaactgttaacatcactttctttttctaccctgctctctggtctgtcattgtcagtatacttaaattccctaaaaattacgaggggctagagaaattaatagtattctctctttttctttctctttctcacacatccacaaagaaagctaatgatttctgtgccctatggatgaggaggccaacaaatggatgtttaagtgaaactttataatcctgttgccctgctaagtttttcatcagtatattttgttgcataactcaaaactgaaaatatagacagaatgaattcaaatagggtttaaagctaaatatatttcatactagtggtcagactgtcttgacatgcttctacatatatgcccaacacatcagctcttactcggaagcattaaagtgaaagtcttttgagagatagacacagtgaaacttttactttagatatatactttggcctgtggttaaacctgcctttttcatctgaaaataagatcagaaactgctgttctgtatatgccatccttcattatgttctgagtctaactgttaggctgtggaaaatttttaatgtatcatcctacagagtctggataacaacagtgaaagaaaagatcaggttctttagaaagtttcacattgtttacaagaaatttgacttcttctctgcctaaaaatacgtaggacaaagtagagcagaatgactgatgcgtctcacatatcaaaaaaatcctctgtgaggagaggaatgtggagaattaagtgagatcagaggtagaagttacagtgtttggtaaagtcatttatttatgcaccaaatgtttatttttacacctgctatgtgcttgtgctgttataggctctagtaatatggcagtggataaaacacacaaaaatccatgttctcatgaagcttacatagtagggacagacagtaaatagaaataagtaaattgtatcatatttgaagggataagtgttatggaatagaaaaagtaaagcataagggagatttgctgtgctaaataagattgtcagggtaggccttactgagaaggtacacctactgtggggctaccttccagggaagagacttaatttgtcccatcctctcatcctttgatctctaaatgatttctaaattaatgaggtggagccaagggatcaaattactggcagccatgtcacccttatttacttaaggataaataaaaaaaactagataaagaaagaaagaaagaaagcctttacagtgaccagatgacagacgatggtggcttggattctggctatcttctaaaggtaaagctgtgcttattttgtttctggtatggtggagtaagcccctgacagtctggccctcctacagttaacactgagcaaaatccaaaaactacctgacggtgctgccaaatgaataaagcaggcagatattgtaaggcagtaaaaagttggagaaaaagatcaacatgaggtgaattttctgttttttgtggttttgatctgaaagtgagctgtagtcctagcatagtatagagtgtctgaaactccattagaaagcctgccatatttttagcctgaggaaccaagagatggaacctggggcaagtatggccaccagagggagttctggagagaagagagcaggaaatgggaatctcaaattctatgtatgagctctacccatgtcactggctcacctctgaaccatgcgtatccaaggcagacgcaaagcagctagcaacaaaggctaaaagaaaactgtgatttgacccaccacaggagaaatggagattatagattaagtctaatcaagttaattcaccattaaaacaaaaatactaattctcttcagaatatagcagaattcagattctctacaatgtaacatttacaaggtccaggataaaatccaaagttatgggataaccagaaaaattagttacttcaacaaagcaatagctaaatttaatttatcttttttttttttttgagataggatcttgccctgttgctcaggctggagtacaatggcacaatcatggctcactgcagcctcagtttcctgggctcaagtgattctcctgcctcagcctgctgaatagcttggactacaggtgcacgccaccacgcctggctaattaaaaaaaaatttttttttttttgtagagatgacatcttgctatgttgcccagactgatctcgaactcttggcctcaagcgattctcccacctctgcctcccaaaatgctgggattatgggcatgagctaccatgctcggcttagtctttctttttttttttttttttttgagacggagtctcactctgtcgcccaggccggactgcggactgcagtggcgcaatctcggctcactgcaagctccgcttcccgggttcacgccattctcctgcctcagcctcccgagtagctgggactacaggcgcccgccaccgcgcccggctaattttttgtatttttagtagagacagggtttcaccttgttagccaggatggtctcgatctcctgacctcatgatccacctgcctcggcctcccaaagttctgggattacaggcgtgagccaccgcgcccggcctcggcttagtctttcttagaaaattgcaaggcggtagagatcatcaggatgctgaaaaggaaaatagataacttgtggtagaatgatactccattgtgaacaaagtggtggtaaacttttgaagatgtttttcaacttacagtgaaaactagaaaatagccataatatgtacacactaattcctccctctgttccttttccttagaatattactaatgtaagcaaaaatgttacagagcctgctatgagctggtaacatttatcaaatgaacaaatgacttattataaactctcaagatggagttccagcattaaatctatagttgcaaaaaaggcttcgtgtagaatccagctgaattcagattaaggcattctaggctttctcccatttctactcctgcctcaaagccaggctcacagaaagcatgatttaaacagacagtcacttcccctctgatcccagcatccacttggctaaatctcacatttgcaaagtaccactaaagcttttccagagttggggataaaggaaaatatgaaggaatcaaagaaaatacaagcttgaagtttgttacctttcttgaacttcttttaaaaagttttgttgtcattaaaatatatttagctggggaaattttaactaatttgtgtttatctgaaaacgtggtacttggagaaacagctcaactgtaaggcctgtggctggtgtctttggagttacaatcattgagggtctctggacacagacttctagtgaccggaggtgtttctgtcagagccagagcatttattcataaactgaggattattttctctacttttacatttacaaagcaatgtaaaatatctgcctggctgtagatcaggatttattaaagatcatctcaagacagagcaagattttaaaaactggatattttaatcttcacatggaagtgaagaacacaaggtactggattctgtcagcaaatcaatcagtatgtcaggatttgtattttgaggaatgtgctaaatggtgtttaaaaacaaagtctggatcagtatatcagggtttatattttgaggaatgtgctaaatgatgtttaaaaacaaagtctggagactcatgagagagaatggaaaattgagtgacatatatgtatacttgctgtccatggagtaagctgtgtggctgttgttagggtaactagaaatcagctacaaaagaacagaagaaatagtgttgtagaaatagcacaaacaaaaggaagccctgagacgagatggctcctttgcagtgcatgggaaccaggagtccaataattatgactcattagaaaaggttaaatggtatgagagaaaaatagaaatttagaatttcaaatataaaatatatacaattatgagtttttaaaaatcagttcttggttagaaaagggaaaatattttgttgatgtgtaaacttctaatggcatctagagatatggctgctggtttctgagaaggaatgctccaaatatgtttccctctgagcacatttagaacagagactcccttggaaatagattctgccagttgtttaccttgaactcaattgtcattaaaactactattcccctcccactgcaggaaagccacaatacactttatatggactcttcaaatcaaaattgtaaaactctttattaaatgtctacctgcttgttgctattaagttttgaacctaaatatataaaacgatatctttttctttcaaggggctctaatggaaaatataaatatttcagcaccccaagacatagaatggagagaaatatatagcagatgtactaaaccaatggtggtgcaggcccaagagctgtgctacaatgagagcctgtgctacaatgagactacagagcaaagtaggtgacatgctcatgcacaaaaaagggaatagaacagaagagataaattctagcatctcaaaaagtgaaagcaaagctagtttataaatggcacaggaaaatgagccttattgtcgtcctgtttattcaacaaaaatcattttacctttcttgattatctacctttaccaaacttagccctgaattactttctgtcatttctaataaatctaccctcaaaaaattgataagctactcccaagatacttaagccatgtgcaatagtctcatagaaggttcaaaacaattctccaaatgcttaaagcaggttgactctatttagtgcctacaatgtgccaggtcctattctaagtcccagatatcagtgaaaactagtaaaatacctctgccttcaaggacttaatataaatctattgccttatgtgtacaaaggaaggatacatttctttggccaagttggactctgtgagcttcctgagctatgtttgtgctcaaggagaaaaaaaactgggaggatattcacttatccaactacacaatgggatgagccctgttctaatgtcctggggatatactagggagctagacagcaatatttctacccataatgggggatgagggagaagcagacaaaaaacaggatgagtaagtaaaatatgcgacgtgttcaattatttatatacagatattatatgtattagaaaaataaagcagagaagggagctagaacatgggataggggaaatttttggtaggataaatgaggagggagttttactcagaggatgacaattgagtaaagacctaaaagaattggggcaacaatcaggtgaatattttggaaaagaagtttccatgtacagggaaccacagcaacttcagaagctctcaggcagaagcatgagcctgaggacagcaaggataccagtgtcattggaacaaaacgaacaaggacataggacaaagtagaccgtgaagtcagagaaacaaatgtctggccttggcgagggagtggtagagaactgtggggttttgaaggctattgtaaatgctttggattttactttaagtgaaatggggaccattgaaggtttctgaggggaagagggacatgttctgacttgggttttaacctgttcactgtagtagccatgttgacagtgaattgtgggaaatgcaggcaaaaacaagaccagttgggagacttaatataataatatcaggagagattgggtttggaccagtggcggcagtaaaatggctttatatgaaaatgttaacagtgattatgattgcctctgagtgaacaattttagtgggattgtggacaattatagctttctgcttttgcttttaagtaattcccacatttactttagtaaacacttataatctgagaaaaatatataaacaacaatgaagagttgctcagggtattgtcagaacgtctaggaggatttcccattacttttttaatttttaaaatgtttttaatatttttgagacagggtcttgctctgtctcccaggctggagtgaagtggtagaatcacagctcattgcagcgttaacctcctaggctcaagtaatcctccaaccccagcctcctgagtagcgggactatgggtgtacaccaccgcacctagctaatgagaatttcccatttattcctgagggttaggaaaagttttctggaagagataatgggaaagcatgagtactcctactaatctttgcagtgaggggcagaaggtattccaagcaaaggagagagtgtgaataaagacttgggaaataagcagtggcaggaagcaccacaagcatttgatgttgttatagtatgaatggtgaaatcagagatgagggaaaagagtgttctgtgccaactaagggtcttgggccttatttataaagaagatgataaagaacatgattgaattttaaggaggggcctggcatagtcatctttaaatatcaaatcatccctccaatggtgaggatctcatagtgcacagataatgtgcagaggttgggtctgaagtttaaatagtttctaataaagttaagcatatgcctactctgtttcagcagttctgctcctaggtgtatacccaagagaaacaagacatgtgcccataaaaaagacaaacaagaatgttcattgaagctttgttcatcatagccaaaaattggaaacaaatcacatatcaacaggagaattgataaataattgtatctatatacatacattgtatctatatataatggaatactacttaaccataaagaatgaagtattgatacagcaacatgaatgaatcttgaaagcattatgttgtgtgaaagaagccagacacagactcctgctccaagatggccaattagatggagccagaagaacatttcccactgacatcccgacattgggaagatggttgcactcctagcacatcttcagagggaagacattgcaagcaaatggagggaagacatagaggctggattgaagggggaagaagctgggaattctgcatggggctaccatgcaccaggattcattcctgaccttcagcaactcctgcagagggggtgagttgaacagacaaggaacaatctgctcttgccacaggccccacaaatcctggcagggagagatccctcaaccaccacagacacttatgttgacagggaaagctgcttagagaagtagtaggggcagaactctggtcagggtggagcccagagggtttggtgtgggagcatctgtagtggagcatggccagagatgcctctcccgctaggcttcacttgctccaataggagactttagcccctagaggaactgtctgacctgaactctgcaaggtgatctggcccatgagatagagccgggtcagacctgagcacccctcagttggctagcctctcccagggccccagcctggctgtgcctgcatcagtgcagccctcaggtaatttgtgggtacccacatcatagctcctgcactggcaggccacgcttggtcggcagagagctccagcatagcagcccccactgacaggctgcagcccacccacacccttcctccactgcagcctccccatgccactttgcctgcacacacgtcaccatggccgctctctatatcactttgcaggcatgtgtgtgtgtgcgtgcaccctgccatgccacacctgcctacatgagtgtccttgcccttgcttccccctgccacaccgccattgttttcagaatgttggtgggctcctttcctcaccagtgccttgcccctgcaccaggggtgctggcataaaactaggcatggaaaatagtggacttgcccctagccctgagcagccactgctgccggcatcaacgcatacagtggatacacacagtcctgctcccaccagtaccctgcccccgtgctaacaccaccattgtgcaaatgtgagcatagtcactaataggaggggttgccccccccagccatacttcaaatgcttgaatggaagctggcacctcagtacccactagcaccctgccccagcagacaagtgtgctccccactgcattgccactgccattggcacatgaaaacaagatcccgctgccaccaccatatgaagtactttggttggcaccacccagcagagtgttgtgaccagcagtcccagagcaccttgacccctccagtgcagcagattcctaatctcaagccagatttcaaagccaagcttgatatcagtttccagagtgaaaccagacattatagaagtcctgagctgagccttggtctcctaaaatcttccagtaatgaagctagttgactgaacccatcttatatcacaatcaaacccccaaggtcattaagtagtataaaagggaaaaaaaaaccatccaaaggatagcaggttcaaatattgaaggaatattagcccacaaagatgagaaagaaccagtgcaagaactctgacaactcagaaagccagagtatcttctttcctccaaacaattgcaacagttctccaacaagggttcttaactgggctgagatggctgaaatgacagaaatagaattcagaatatgaataggaatgaagatcattgagattcagaagaacgttgaaacacaatctaaggaagctaagaatcacagtaaaacaatacaggagctgacagacgaaatagccagtatagaaaagaacataaccaatctgatagagctgaaaaacactctagaagaagtattaacagcagaatagaccaagctgaggaaagaatctcagagcttgaagactggctttctgaaataagacagacaagataaagaaaaaaagaatgaaaaggaacaaacaaaacttccgataaatataggattatcaagagattgaatctgcaactcattggcatccctgaaagagatcgggaaaatggaaagaacttggaaaacgtatttcattatatcatccatgagaacttcccaacctagctagagggccaacattcaaattcaggaaatgcagaaaactcccagaaaatacttcacaagaggatcatccccagtacatgtaagtcatcatattcttcaaggttgaaatgaaagaaaaaatattacaggcagctagagagaaaggacagctcacctacaaagggaagcccatcaaacaaatagtggacctctcaacagaaaccctacaagccagaagagattgagggccaatattcaacattctttttttttttttttgagacagagtcttgctgtgttgtccaggctggagtgcagtgtcatgatcttggctcactgcaacctccgcctcctgggttcaagcagttctcctcagcctcccaagtagctgggattacaggcacatgcctggctaattttatgtttctagtagagacagggttttgccatgctggtatcatcattcttaaaaaaaggaaatctcagcaaagaatttcatatccagccaaactaagcttcataagcaaaggggaaagaagatccttgtcaggcaagcaaatgctgaggaaattagttaccaccagacctgccttacaagagcttctaaacgaagcactaaatatggaaaggaaagaccattgccaaccaccacatacacacacttaggtacacagaccagtgacactataaagcagccacacaagttagcaaatagcttaaacaaataaacacgaacacaggataaaatttacacattcactactaaccttggatgtaaatgggcaaaatgccccaattaaaaggcacagagtaacaaggtggataaagaagcaagacccagtggtatgctgtcttcaagagacccatctcacattcattgatacccataggctaaaaataaagggatggagaaaaatctaccaagcaaatggaaaacagaaaaaagcagggattgcaatcctgatttcagacaaaacagatttcacaccaacaaagatcaaaaagacaaaagagcattatataatggtaaagggttcaattcaacaagaagacctaactatcctaaatatatatgcgctcaacacaggagcactcaaattcataaagcaaattcttagagaccttcaaagaaacttagactcccacacaacaatagtgggagacttcaacaccccacttacagtgttagatcatcaaggcagaaaattagtgaagatatgcaggacctgaactcaacactggaccaaatggatgtgatagacatctacaaaactccaccccaaaacaacagaatatacattcttatctgcacatggcacataccctaaaattaactacaccgttagacataaaacaatcatcagcaaatacaaagcaagcaaagtcacatcaaccactttctcaaaccacagagcaataaaaatagaattcaagaataggaaaatctctcaaaatcacacaattacagggaaattggacaacttgctcctgaatgacttttaggtaaataatgaaattaaggtggaaatcaagttctttgaaactaatgagaacaaagatacaacatatgagaatctctggaacgcagctaagacagtgttaagagggaactttattgcactaaacactcatatcaaaaagctagaaagatctctaacaacctaacatcacaactaaaagaactagaaaagcaagagcaaaccaacctcaaagctagcagaagataaccaataccaaaatcagatctgaagtgaagaagattgagacacaaaaaaattcaaaagatcaatgaatcaagatgattttttgaaaaaaataataaaatagtccattagctagactaataagaaaagagagaagacccagccagatgaaatggctcatgtctgtaatcccagtactttgggaggccaagtccagaggtccaggtggaccactggaacctgggaatttgagaccagcttaggcaacatggcaaaaccccatctctacaaaaaatactaaaattagccagtcatggtggcacacacctgtagtcccagctactcgtgaggccaaagtggaaggattgcttggatctgagaggtagaggttacagtaagccaagatcataccactgcactcaagcctgggtaacaggagtgaactctgtctcaaaaaaaaaaaattcaaataaacacaatctgaaatgacaaagggaatattaccactcaccgcatagaaatacaggtaacaaccagagagtattttgaacacctctgtgcatgcaaactaaaaaattcagaacaaatggataaattcctgggtacatacaccctcccaagactgaactagggaagaaattgaatccctgaacagacaaatgacaaactccaaaactgaatcagtaataaatagcctaccagccaaataaataaataaataaataagctctagaccagacggattcacagccaaattctacagatatacaaagaaaagctggtgccattcctctgaaactattcccaaaaaatgagaagagactcctccccaactcattctatgaggtcagcatcattctgataccaaaacctggcagagacacaccaccaccaccaccaacaacaacagacacttcaggccattatccttgatgaacattgatgcaaaaatcctcaacaaaatactagcaaaccaaatccaacagcacaccaaaaagcttatccactgtgatcaagtaggctttatctctggtatgcaaggttgatttcaacatactcagatgaataaatgtgattcaacacataaatagaactaaagataaaaaccccatgattatctcaatagatgcggaaaaggctttcaaaaaaattcaacatttcttcatgttaaaaactctcaatgaactagatattggaggaacatacctcaaaataataagagccatctatgacaaacccacagccaacctcatactgaatagacaaaagttggaagcattccacttgaaaactggcacaaggatgtcctctctcaccattcatattgaacagattgttggaaacctgaccagagcaattagggagaacaaagaattaaaaggcctctacgtaggaagagaagaagtcagtctatctctgttttcagatgacatggttctattctagaaaaccccataatctcggcccaaaagctccttaagctgataaacaacttcagcaaagtttcagaatacaaaatcagtgtacaaaaatcactagtattcctatacccaacaacagctaagctgagagccaaatcaggaaggtagtcccattcacaattgccacannnnnnnnnnnnnnnnnnnnnnnnnnnnnnnnnnnnnnnnnnnnnnnnnnnnnnnnnnnnnnnnnnnnnnnnnnnnnnnnnnnnnnnnnnnnnnnnnnnnnnnnnnnnnnnnnnnnnnnnnnnnnnnnnnnnnnnnnnnnnnnnnnnnnnnnnnnnnnnnnnnnnnnnnnnnnnnnnnnnnnnnnnnnnnnnnnnnnnnnnnnnnnnnnnnnnnnnnnnnnnnnnnnnnnnnnnnnnnnnnnnnnnnnnatcatgctactctactttgttgttttaaatacactaactttaaaatatactacaaggctgcagtaaccaaaacagcatagtattggtacaaaaacagacacatagaccagtggaacagaatagagagaccagaaataaggctatacacctacaactatctgctctttgacaaagctgacaaaaataagcaatggggaaatgattccttattcaagaaatggtgctgggatacctgcttaaccatatgcagaagattgaaactgaaccccttccttataccatatgtaaaaatcaactcaagatggattaaagacttaaatataaaaaccctggaagacaacctaggcaataccattgtgtacatgggaacaggcaaagatttcatgatgaaaacaccaaaagcaattgcaacaaaagcaaaaattgacaaatgggatctatttaaagagcttctgcatgggaaaagaaactatcaacagagtaaacagacaacctacagaataagataaaatttttgccacctgtgcacccgacaaaggtctaatatccatctataagaaacttaacacatttacaagaaaaaaacaacttcaatataaagtaggcaaaggacatgtacagtcacttttcaaaaaaagacatacacgtggccaagaagcatatgaaaaattcagcatcactgatcattagagaaatgcaaatcaaaaccacaatgagataccatctcacaccagtcagaatggctactatttaaaagtaaaaaataataataataacagatggtggtgaggttgtggagaaaagggaacacttatacactgttggtgggagtgtaaattagttcaaccattgtggaaagtagtgtggcagttcctcaaagacctaaaaacagaactaccatttgactaagcaatcccattactgggtacatacccagaggaatataaatcattctgttataaagacacatgcatgcatatgttcattgtagcactaataaattttttggaaaaaagaatagagaaaaaattataagtaaaaaagccagactcaaaaggatacatattgaatgattttgtttatgtaaagttcaagaataggcaaacctgaactatagtcatggttggtagtattcactagaaagatcacaacagaaccttttagatggtggaattaattctgcatcatgatatgccatggtgattccctaagcaaaaattcatcaagttgtatacttagatttgtgcctattgccatatgtaaactgtactttggtacattaagagagaaaaagaaagatggcatagtttgcaacctggatagtggaagtgacaataaagataaaaggacacattcaagagacttgtttttagaggtatgtgaagtgggaggggcgactgttgagtgtatgtagaagccattagccacaggagggtatgcaaaaggagtggacaggttttaaaccaggagttcttaatcttaaatgcacatacaattaaagtttttaatatcctggccactctacagattaattaaaacaggatttctcagatgatttcaatgtgtaggaaaggtgaagaactagtgcctgtgacagctgagctcaaggactctgttggattttgggtagagctgctacatctaaaaggtattaagagggtattataagtaatttgttactaatacagtgctgatttgaaaaacatttacttcttataaatttgagtggatttgagattataatattcttcttgtttatttattcaaaacacattgtatgcccaccatatataagatattgttccagctgctggggattcagcataaaacaagacagagaaaatccctgtattcttgtagtttatgttctagagggggagatagaggataaatatatatatatataactggcatgaggtaaattcttcaaagaaaatgaagcaatgagaatcacagaaatagggcatggcactttttaaagtagggcagttaggcatgacctctctaaagaggtgacactgactctgcaggttattaaaacattgaacatttcaggaccccagtgactgaccccacaacaattccccttcagttgccaaactctgggcttcctcagccattgacctctagaagaccccagtaatctactggtattggcccccacatactattgctagaagctgtaccatcactaaaactctgaagcttctcgaacattaatccacgtaccagaaacactaatccaccctgactccagagctgctgacagcttcccttggactataaatcagacagacttccagtcataagacaatgagacactgcaagaccccagataaatcactggactcacgtagatgtctccatcagtgatctaatatacctgttaatccctcataccccaacactgatactcagaattttcctgtattctgcagtgcccagtagttcaacaaatcttttgtcattatagttctttcaaaccttgctatttgaggtttgattcaaagacaaatagcgtcaacaaaatttgagagtttgttagaaattgattgtcacggcctgtaatctcagcactttgggaggctaaggagggaggatcacttgaaaccaggagtttgagatcagcctgggcaacaagcaagaccccatctctacaaaaaataagaattagcaaggcatggtggcacatgcttgtagtcccaggtacttgagaggctgaggtgggaggatgacttgagccctggaggtcgaggttgcagtgagccatgattgcatcactgcgttcaagtctgggcaacagagcaagaccctgtctcataaaaaaaaaaatgcctgaatgattggaatggtagatatatagaaagaagtctaggccagagatttagatattagcaatcaatgattgttgacatcagaacagtgtgccaaataaccaagggggaatattttagataaagaattggatgaaggaaaaaggaagaagacctagctaagtagactgtaaaggagcagtcagacgggagaatcagtagaagccaacaaaggaaacatttcaagagcagagatagggtgagacagggacgcttcctgtggccaacattatttcacaccagcatcaatgccagaggctgcagaggaatgacacaatgataggattggatatggaggccatcagtggagattttagtttaaataaagtgttttgaatttttggataagtagaaacttaaccaaagttggctgaggaatgaaagagcagtgtaggaatatagaggcagaaatgaggatacctctgtagaagtttggtgaaaaacaaaatggacagggttagggaaggcttttttgttgttgttgtttctttgtttttattgttattttactttaagttctgggatgcatgtgcagaacatgcaggtttgttacataggtatacatgtgccatggtggtttgctgcacccatcaacctgtcatttacattaggtatttctcctaatgctttccttccccttgccccccaacccccaacaggccccagtgtgtgatgttcccctccctgtgcccatattttctcattgttcagctcccacttacgagtgagaacgtgcggtgtttggttttctgttcctgtgttagtttgctgagaattatggtttccatcttcattcatgtccctgcaaaggacatgaactcacccttttttatgactgcatagtattccatgttgtatatgtgccacattttctttatccagtctatgattgtttggcatttgggttggttatctattgtgaatagtgctgcaataaacatatgtgtgcatgtgtctttatagtagaatgatttataatccttagggtatatacccagtaatgggattgctgggtcaaatggtatttctagttgtagatccctgaggaatcgccacactgtttttcccaatggttgaactactttacactcccaccaacagtgcgaaagcatccctatctttccacatcctctcaagcatctgttgtttcctgactttttaatgatcgtcattctaactggcatgagatggtatctcactgtggttttgatttgcatttctctaatgaccagtgatgatgagtttttttcatgtgcttgttgactgcataaatgtcttcttttgagaagtgtctgttgatatcctttgttcactttttgatggggttgtttgtttttttcttgtacatttgtttaagttccttatagattccggatattagccctttgtcagataggtagatgggaaaaattttccccattctgtaggttgcctgttcactctgatgatagtttcttttgctgtgcagaagctctttagcttaattagatcccatttgtctattttggcttttgttgccattgcttttggtgttttagtcatgaagtctttgcccatgcctatgtcttgaatgatattgcctagattttcttctagggtttttatggttttaggtcttatgtttaagtctttaatccatcttgagttaatttttgtataagtcgtaaggaagggatccagtttcagttttctgcatatggctagccagttttcacaacagcatttattaaatagggaatcctttccctattgcttgtttttgtcaagtttgtcaaagatcagatggttgtagatgtgtggtgttatttctgaggcctctcttctgttccattggtctatatctctgttttggtaccagtactgtgctgttttggttactgtcaccttgtagtatagtttaaagtcaggcaacgtgatgcctccatctttgttctttttgcttagaattgtcttggctatatgggctcttttttggttccatatgaaacttaaagtagttttttctaggccagacgtggtggctcatgcctgtaatcctagcactttgggaggccaaggtgggcagatcatgatgtcaggagatcaagaccatcctggctaacacagtgaaaccccatctctactaaaaatacaaaaaattagctgggcgtggtggtgggcacctgtaatcccagctactcgggaggctgaggcaggagaatggtgtgaacccgggaggtggagcttgcagtgagctgagatcgcgccactgtactccagcctgggctacagagtgagactccatctcaaaaaaaaaaaaaaaaaaaaaagggtagtttttttctaattctgtgaagaaaatcaatggtagtttgatgggaatagcattgaatctatgaattactttgagtattatggccattttcacgatattgattcttcctatccatgaacatggaattttttccatttgtttgtgtcctctcttattcccttgagcagtggtttgtagttctccttgtagaggtccttcacatttcttgtaagttgtattcctgggcattttattctcttagtagcaattttcaatgggagttcactcgtgatttggctctctatttgtttattattggtgtataggaatgcttgtgatttttgcacattgattttgtatcctgagactttgctgaagttgcttatcagcttaagaagtttttgggctgagacgatgagattttctaaatataccatcatgtaatctgcaaacagagacaatttgacttcctctctttccattagaatatcctttatttgtttctcttgccttattaccctggccagaacttccaatactatgttggatgggagtggtgagagagggcatccttgtcttgtgccagttttcaaggggaatgcgtccagcttttgcccattcaatatgacattggctgtgggtttgtcataaatagttcttattattttaagatattttccataaatacctagtttattgagtgcttttagtatgcagggctgttgaattttgttgaaggccttttctgcatctatttagataatcatgtggtttttgtcattggttctgtgtatgtgatggattacatttatttatttgtgtatgttgaatcagccttgcctcccaggggtgaagctgacttgattgtggtggataagctttttgatatgctgctggaattgggcttcctagtattttattgaggatttttgcatcgatgttcatcagggatattggcctgaaattttctttttttattgtgtccctgccaggttttggtataagggtgatgctggcctcataaaatgagttagggaggagtccttcttttcatgttgtttggaataagttcagaaggaatggtagcagctcctctttatacctctagtagaaatcggctgtgaatccatctgatcctcgggtttttttggttggtaggctgttaattactgcctccatttcagaacttgttgttctattcagggattcaccttcttcctggtttagtcttgggagagtgtatgtgtctaggaatttatccatttcttctaggttttgctagtttatttgcttttaggtgtttatagtattctactgatagtagtttgtatttactgtgggatcagtggtgatcaaccctttataatttttaatnnnnnnnnnnnnnnnnnnnnnnnnnnnnnnnnnnnnnnnnnnnnnnnnnnnnnnnnnnnnnnnnnnnnnnnnnnnnnnnnnnnnnnnnnnnnnnnnnnnnnnnnnnnnnnnnnnnnnnnnnnnnnnnnnnnnnnnnnnnnnnnnnnnnnnnnnnnnnnnnnnnnnnnnnnnnnnnnnnnnnnnnnnnnnnnnnnnnnnnnnnnnnnnnnnnnnnnnnnnnnnnnnnnnnnnnnnnnnnnnnnnnnnnnnnnnnnnnnnnnnnnnnnnnnnnnnnnnnnnnnnnnnnnnnnnnnnnnnnnnnnnnnnnnnnnnnnnnnnnnnnnnnnnnnnnnnnnnnnnnnnnnnnnnnnnnnnnnnnnnnnnnnnnnnnnnnnnnnnnnnnnnnnnnnnnnnnnnnnnnnnnnnnnnnnnnnnnnnnnnnnnnnnnnnnnnnnnnnnnnnnnnnnnnnnnnnnnnnnnnnnnnnnnnnnnnnnnnnnnnnnnnnnnnnnnnnnnnnnnnnnnnnnnnnnnnnnnnnnnnnnnnnnnnnnnnnnnnnnnnnnnnnnnnnnnnnnnnnnnnnnnnnnnnnnnnnnnnnnnnnnnnnnnnnnnnnnnnnnnnnnnnnnnnnnnnnnnnnnnnnnnnnnnnnnnnnnnnnnnnnnnnnnnnnnnnnnnnnnnnnnnnnnnnnnnnnnnnnnnnnnnnnnnnnnnnnnnnnnnnnnnnnnnnnnnnnnnnnnnnnnnnnnnnnnnnnnnnnnnnnnnnnnnnnnnnnnnnnnnnnnnnnnnnnnnnnnnnnnnnnnnnnnnnnnnnnnnnnnnnnnnnnnnnnnnnnnnnnnnnnnnnnnnnnnnnnnnnnnnnnnnnnnnnnnnnnnnnnnnnnnnnnnnnnnnnnnnnnnnnnnnnnnnnnnnnnnnnnnnnnnnnnnnnnnnnnnnnnnnnnnnnnnnnnnnnnnnnnnnnnnnnnnnnnnnnnnnnnnnnnnnnnnnnnnnnnnnnnnnnnnnnnnnnnnnnnnnnnnnnnnnnnnnnnnnnnnnnnnnnnnnnnnnnnnnnnnnnnnnnnnnnnnnnnnnnnnnnnnnnnnnnnnnnnnnnnnnnnnnnnnnnnnnnnnnnnnnnnnnnnnnnnnnnnnnnnnnnnnnnnnnnnnnnnnnnnnnnnnnnnnnnnnnnnnnnnnnnnnnnnnnnnnnnnnnnnnnnnnnnnnnnnnnnnnnnnnnnnnnnnnnnnnnnnnnnnnnnnnnnnnnnnnnnnnnnnnnnnnnnnnnnnnnnnnnnnnnnnnnnnnnnnnnnnnnnnnnnnnnnnnnnnnnnnnnnnnnnnnnnnnnnnnnnnnnnnnnnnnnnnnnnnnnnnnnnnnnnnnnnnnnnnnnnnnnnnnnnnnnnnnnnnnnnnnnnnnnnnnnnnnnnnnnnnnnnnnnnnnnnnnnnnnnnnnnnnnnnnnnnnnnnnnnnnnnnnnnnnnnnnnnnnnnnnnnnnnnnnnnnnnnnnnnnnnnnnnnnnnnnnnnnnnnnnnnnnnnnnnnnnnnnnnnnnnnnnnnnnnnnnnnnnnnnnnnnnnnnnnnnnnnnnnnnnnnnnnnnnnnnnnnnnnnnnnnnnnnnnnnnnnnnnnnnnnnnnnnnnnnnnnnnnnnnnnnnnnnnnnnnnnnnnnnnnnnnnnnnnnnnnnnnnnnnnnnnnnnnnnnnnnnnnnnnnnnnnnnnnnnnnnnnnnnnnnnnnnnnnnnnnnnnnnnnnnnnnnnnnnnnnnnnnnnnnnnnnnnnnnnnnnnnnnnnnnnnnnnnnnnnnnnnnnnnnnnnnnnnnnnnnnnnnnnnnnnnnnnnnnnnnnnnnnnnnnnnnnnnnnnnnnnnnnnnnnnnnnnnnnnnnnnnnnnnnnnnnnnnnnnnnnnnnnnnnnnnnnnnnnnnnnnnnnnnnnnnnnnnnnnnnnnnnnnnnnnnnnnnnnnnnnnnnnnnnnnnnnnnnnnnnnnnnnnnnnnnnnnnnnnnnnnnnnnnnnnnnnnnnnnnnnttcccttgcattgggttagaacatgctcctttagcttggaggagtttgttattacccaccttctgaagcctacttctgtcaattcatcagactcattctctgtccagttttgttgccttgctagcaaggagttgtgatcctttggaggagaagaggcattctggtttttggaattttcagcctctttgcactggtttttcctcatcttcgtagatttatctacctttggtctttgctgtttgtgacctttggttggagtttatgcatggtcgtattttttgctgatgttgatgctattcctttctgtttgttagttttccttctaacaatcatggccctcttctgtagatccactggagtttgctaggggtctactccagatcctgtttgcctgggtatcaccagtggaggctacagaacagcaaagattgctgtctgtccttcttctgaaagctttgtcctagaggggcacccattgggtgccagccagagctctgctgtatgaggtgtctgtcgacccctactgggagttgtctccctgtcaggaggcacgggggtcaaggacccacttgaggaggctgtctgtcccttagcagagctcaagcaccgtgctgggagattgctgctctctgcagagctggcaggcagaaacgtttatgtctgctgaagctgcgcccacacctgccacttcccccaggtgctctgtcccagggagatgggagtttgatctataagcccctgactggggctgctgcctttctgtcagagatgcccttcccagagtggaggaatctagagaggcagtctggctacagtggttttgaagcactgtgtttggctctgccaagtccaaacatcctggtgacttggtttacactgtgaggggaaaaccacctactcaagcctcagtaatggtggatatccctcctgccaccaagctcgagcatcccaggttgacttcagacttgtgcgctggcagcaagaatttcaagccagttgatcttagcttgcttgtccccgtgagggtgggatccgctgagcaagactacttggcttcctggcttcagcttcctttccaggggagtgaatggttctgtctcactggcgtttcaggcaccactggggtatggaaaaaaacaaacaaacaaaaacaaacaaaaaaactcctgcagctagctcagtgtctgcccaaacagccgcccagttttgtgcttgaaacccagggcccttgttgtgtaggcatccgtgggaatcttctagtctgtgtgttgcaaagaccataggaaaagcatggtatctgggccagatagcaccatccctcacagcagggtccctcatggcttcccttagctagggaagggagttccccaaccccttgtgctttcggggtgaggcgatgccccactctgcttctgctcgccctccatgggctacacccactgtgtaaccagtcccagtgagatgaacctagtacctcaattggaaatgcagaaatcaccccgcttctgcattggtcttgctgagagctgcagactggagcttttcctattcagccaccttgcccaggaatcccagggaaggcttttagtgcaggaaaagagttggcagagaagggggacatggagatttcagtgaggagagattgctcagtggggcattattccacagggactgggaaggaaggatagaaatacctgcaatcataaataagttgagttatgataagttttaaagacaattggaagacatttatgtccagtgatttgtatttttctaagaggcgtaaggagaaatgtaaaggtctggatcagtctctgtggggaatgagggagagaaaggggcaagagtgaacactcctctagagcacgtaccaaaccctgtgtcaggagcttcacatcattatttaatttagtccctaaatcagctgagtgaggttgaacagtttgctagtatccaatccaagatttaaatccctgtctgtgtcctgcattattttcattactccatattgcttcagagattcataagacaatagccagccatatcacaggattagcatgagatggaaatcagaagcttttaagaggaactaatggtcatagtcatggactccagaagcccaagggtctgtacttgataactgctcactgtcccttccaaaaaacaacaggcaagtttccctatcagcaaccccctaggatattatttattcttgatggccagaatgttacatccctggtagcgtatcatgagctcagatttaaggaaaaaagctgaggaataaactttctaatatcagaattaaacatttagcactggtgcagtggctcatgcctgtaatcccagcactttggaaggtcaaggcaggaggattgcttgaggccaggagtttaagaccagcttgggcaacatagtaagacccggtttctacaaaaaaatttaaaagtatccaggtatggtggtgtgcacctgtagtcctaggtacttgggaggctcagatgggaagagcccagaagtttgaggttacagtgagcccagacaacggagcaagactttgtctcaaaataaaagaaagatagagaaagaaaggaaaataattaaacatttacatgcttcagaaaccctgaaatacacaattgttatatgtcttaaatagttcgtcttggatttttgcattgaaacatatttttacttccattgagaaatgtgtgaagtatattaatactcatattgataaggctgagcaccctatggatagcttaagaggaacagtttaacctaatttattttgacttggttagtggcatttgcatgggaaaaggaaatggaaaaggaaatggaaaaagtggaaaaggaaatggagggattggcttgcagccagcttcccactgcccagaagagcatcctgacatctgacctgggtctgcaggatttatggatatatgaggacatagagatagattagggagaacgatgctgggacactttgatactctctccttagaagattgcatgcgcacacagacacataatcgtttacatcctgcttcagaggatacatagatcttctgaaacctgtctcaagcccagattaaaaactgtcctttaaagcataaaagacccactctgataacagtccccatgctgtcatatgcctcatacctcagcatccacttcattttatccacctactctggctccacactttgctcctgaccagggtgtggtcagccataaccagtccgtagcttcattccactgcccgggaggataattcagcctacccatggtccatctccacccaacactagccctgcccatggttttccagcttcagcccataagtcagaactcacaaggattcctgagtttgacctctgagatctgtccttgtccttgtcctaaactctgaactcacactgccactggccttacctgccctaccctatattctttgagggttgcagagatgtaagacatacagtctctgctgctttgcagacaaggatgctggacttaaaagacatgttggggttctccaagaccacccttagtgattattcactacaaggactcatagggcttagcatatacttgtagtcatggctaagacttatgacagtgatgtagtaaggatacatagctggatcataacagaaagacacagactttggaggaatctacacacaagcttctttgtgctctctgtctcacacatgaggggtcacacagagcactcttccagcaatgaaaatgtagcattatgtgtgtgatatttcagccctgggaagcccattagggactcagcacccaaggtttattgggggctgtcacatgggcaccctctgtgtagcacatgctaaattccgagctcccaggagggaagcaggtatttaacataagccgtattgttcacacagacagtctaggcatagtgagccacgcttagttgttgggaacactctgaaaaccaaataccagatgccagctaagggccagccttgcaagcagacccttctaaatagcagtctcaggcctgctatgttaactcttttctgtgccccaagctcctggttcatagaattttggcccaccatgagcgtgtagaccacaaacaacttcatctatgctttgactgctaggtttttagatgtcaagtttcctcttgccatttctaagccttggagatgaggaatgcctgtaccagagagtgccattcctagatctggccctctggacatccttcctccagcccaagaaccgcacctgtgtatcctcatctcagtgctgccagcattataatgttatactttggaaattgatatagttttctctaatatgagaacggtgctgctatgcactagtacagggtcctttgtctcagtgacccctcacagaccctgcagggctaggctgtccaatacaactgaattgttctatatatggggggcattatggtagccactagccacatgtgactgttgagcacttgaaatgtggctaatgtgactgagtctttaactttatttaattttaatataaatagcaatttgtggctagtggctacctgttggttagcacagcataaaacctggtgggctgaatgatctggtaagctgattgtgcagggccatggcagaaaggatagactgagtgcacagaatatcaagaagaaggaaagacatgaagcaaaagaagaaaattaagagagttctttgaagtctgggtatatccatttgtgcacatttataaatatgtatgatttagagagatgtagctattttcaaatgctttatttctttttgatcaatattaaatcttattttcaccattcagatactatatcttgaaagacagttggaatgagtacagattttggaaaagccaggcttaggctaaaatcttgtctctgtagcttattagctacaatactataatattgttttaaaagtaatgccataaggctggatgtggtggctcatgcctgtaatcccagcactttgggaggctgcggtgggtggatcacctgaggtcaggagttcgagaccagcctggccaacatggtgaaaccctgtctctactaaaaaaaaaaaaaaaaaaaattagccagatttggtggcgtgttcctgtagtcccagctactcaggaggctgaagcagaagaatcgcttgaacctaggagccgagatcacgccactgcactccagcctgggcaacagactgagactccatttcaaatataaataaataaatagccatactttttttatattaagagagagtaaaaagcaatttaacatagttcagtggacattcttatattttcaatgtttctaaaacctaaaagttgttaagtactaaaaatttgaaagcatttaggaactttctttgctgttcttccctgaagttgttcctgaacttcccagttgtgtactttaaaagcctagaaaatatctagtaaagtatctgacaaatttaaatattaatgtggctttcaggttggctcaattttctagctcctatttataaacagcctatatttttctatttcctctgtgtgtgtttagtttctgtaagctctgcctttctcatcaggattccctcattttggactaagtctgtgacaagctctgtcttgtgctgtgacatgtaatatcatattaaacaagcaagactttgcctcattgaggcacagaaacagcagcagaaatagtgaaaataacaagttaataaatataaatatgtatattctggtattcttagaggacttccataatcacaataggacaaatatagaggannnnnnnnnnnnnnnnnnnnnnnnnnnnnnnnnnnnnnnnnnnnnnnnnnnnnnnnnnnnnnnnnnnnnnnnnnnnnnnnnnnnnnnnnnnnnnnnnnnnnnnnnnnnnnnnnnnnnnnnnnnnnnnnnnnnnnnnnnnnnnnnnnnnnnnnnnnnnnnnnnnnnnnnnnnnnnnnnnnnnnnnnnnnnnnnnnnnnnnnnnnnnnnnnnnnnnnnnnnnnnnnnnnnnnnnnnnnnnnnnnnnnnnnnnnnnnnnnnnnnnnnnnnnnnnnnnnnnnnnnnnnnnnnnnnnnnnnnnnnnnnnnnnnnnnnnnnnnnnnnnnnnnnnnnnnnnnnnnnnnnnnnnnnnnnnnnnnnnnnnnnnnnnnnnnnnnnnnnnnnnnnnnnnnnnnnnnnnnnnnnnnnnnnnnnnnnnnnnnnnnnnnnnnnnnnnnnnnnnnnnnnnnnnnnnnnnnnnnnnnnnnnnnnnnnnnnnnnnnnnnnnnnnnnnnnnnnnnnnnnnnnnnnnnnnnnnnnnnnnnnnnnnnnnnnnnnnnnnnnnnnnnnnnnnnnnnnnnnnnnnnnnnnnnnnnnnnnnnnnnnnnnnnnnnnnnnnnnnnnnnnnnnnnnnnnnnnnnnnnnnnnnnnnnnnnnnnnnnnnnnnnnnnnnnnnnnnnnnnnnnnnnnnnnnnnnnnnnnnnnnnnnnnnnnnnnnnnnnnnnnnnnnnnnnnnnnnnnnnnnnnnnnnnnnnnnnnnnnnnnnnnnnnnnnnnnnnnnnnnnnnnnnnnnnnnnnnnnnnnnnnnnnnnnnnnnnnnnnnnnnnnnnnnnnnnnnnnnnnnnnnnnnnnnnnnnnnnnnnnnnnnnnnnnnnnnnnnnnnnnnnnnnnnnnnnnnnnnnnnnnnnnnnnnnnnnnnnnnnnnnnnnnnnnnnnnnnnnnnnnnnnnnnnnnnnnnnnnnnnnnnnnnnnnnnnnnnnnnnnnnnnnnnnnnnnnnnnnnnnnnnnnnnnnnnnnnnnnnnnnnnnnnnnnnnnnnnnnnnnnnnnnnnnnnnnnnnnnnnnnnnnnnnnnnnnnnnnnnnnnnnnnnnnnnnnnnnnnnnnnnnnnnnnnnnnnnnnnnnnnnnnnnnnnnnnnnnnnnnnnnnnnnnnnnnnnnnnnnnnnnnnnnnnnnnnnnnnnnnnnnnnnnnnnnnnnnnnnnnnnnnnnnnnnnnnnnnnnnnnnnnnnnnnnnnnnnnnnnnnnnnnnnnnnnnnnnnnnnnnnnnnnnnnnnnnnnnnnnnnnnnnnnnnnnnnnnnnnnnnnnnnnnnnnnnnnnnnnnnnnnnnnnnnnnnnnnnnnnnnnnnnnnnnnnnnnnnnnnnnnnnnnnnnnnnnnnnnnnnnnnnnnnnnnnnnnnnnnnnnnnnnnnnnnnnnnnnnnnnnnnnnnnnnnnnnnnnnnnnnnnnnnnnnnnnnnnnnnnnnnnnnnnnnnnnnnnnnnnnnnnnnnnnnnnnnnnnnnnnnnnnnnnnnnnnnnnnnnnnnnnnnnnnnnnnnnnnnnnnnnnnnnnnnnnnnnnnnnnnnnnnnnnnnnnnnnnnnnnnnnnnnnnnnnnnnnnnnnnnnnnnnnnnnnnnnnnnnnnnnnnnnnnnnnnnnnnnnnnnnnnnnnnnnnnnnnnnnnnnnnnnnnnnnnnnnnnnnnnnnnnnnnnnnnnnnnnnnnnnnnnnnnnnnnnnnnnnnnnnnnnnnnnnnnnnnnnnnnnnnnnnnnnnnnnnnnnnnnnnnnnnnnnnnnnnnnnnnnnnnnnnnnnnnnnnnnnnnnnnnnnnnnnnnnnnnnnnnnnnnnnnnnnnnnnnnnnnnnnnnnnnnnnnnnnnnnnnnnnnnnnnnnnnnnnnnnnnnnnnnnnnnnnnnnnnnnnnnnnnnnnnnnnnnnnnnnnnnnnnnnnnnnnnnnnnnnnnnnnnnnnnnnnnnnnnnnnnnnnnnnnnnnnnnnnnnnnnnnnnnnnnnnnnnnnnnnnnnnnnnnnnnnnnnnnnnnnnnnnnnnnnnnnnnnnnnnnnnnnnnnnnnnnnnnnnnnnnnnnnnnnnnnnnnnnnnnnnnnnnnnnnnnnnnnnnnnnnnnnnnnnnnnnnnnnnnnnnnnnnnnnnnnnnnnnnnnnnnnnnnnnnnnnnnnnnnnnnnnnnnnnnnnnnnnnnnnnnnnnnnnnnnnnnnnnnnnnnnnnnnnnnnnnnnnnnnnnnnnnnnnnnnnnnnnnnnnnnnnnnnnnnnnnnnnnnnnnnnnnnnnnnnnnnnnnnnnnnnnnnnnnnnnnnnnnnnnnnnnnnnnnnnnnnnnnnnnnnnnnnnnnnnnnnnnnnnnnnnnnnnnnnnnnnnnnnnnnnnnnnnnnnnnnnnnnnnnnnnnnnnnnnnnnnnnnnnnnnnnnnnnnnnnnnnnnnnnnnnnnnnnnnnnnnnnnnnnnnnnnnnnnnnnnnnnnnnnnnnnnnnnnnnnnnnnnnnnnnnnnnnnnnnnnnnnnnnnnnnnnnnnnnnnnnnnnnnnnnnnnnnnnnnnnnnnnnnnnnnnnnnnnnnnnnnnnnnnnnnnnnnnnnnnnnnnnnnnnnnnnnnnnnnnnnnnnnnnnnnnnnnnnnnnnnnnnnnnnnnnnnnnnnnnnnnnnnnnnnnnnnnnnnnnnnnnnnnnnnnnnnnnnnnnnnnnnnnnnnnnnnnnnnnnnnnnnnnnnnnnnnnnnnnnnnnnnnnnnnnnnnnnnnnnnnnnnnnnnnnnnnnnnnnnnnnnnnnnnnnnnnnnnnnnnnnnnnnnnnnnnnnnnnnnnnnnnnnnnnnnnnnnnnnnnnnnnnnnnnnnnnnnnnnnnnnnnnnnnnnnnnnnnnnnnnnnnnnnnnnnnnnnnnnnnnnnnnnnnnnnnnnnnnnnnnnnnnnnnnnnnnnnnnnnnnnnnnnnnnnnnnnnnnnnnnnnnnnnnnnnnnnnnnnnnnnnnnnnnnnnnnnnnnnnnnnnnnnnnnnnnnnnnnnnnnnnnnnnnnnnnnnnnnnnnnnnnnnnnnnnnnnnnnnnnnnnnnnnnnnnnnnnnnnnnnnnnnnnnnnnnnnnnnnnnnnnnnnnnnnnnnnnnnnnnnnnnnnnnnnnnnnnnnnnnnnnnnnnnnnnnnnnnnnnnnnnnnnnnnnnnnnnnnnnnnnnnnnnnnnnnnnnnnnnnnnnnnnnnnnnnnnnnnnnnnnnnnnnnnnnnnnnnnnnnnnnnnnnnnnnnnnnnnnnnnnnnnnnnnnnnnnnnnnnnnnnnnnnnnnnnnnnnnnnnnnnnnnnnnnnnnnnnnnnnnnnnnnnnnnnnnnnnnnnnnnnnnnnnnnnnnnnnnnnnnnnnnnnnnnnnnnnnnnnnnnnnnnnnnnnnnnnnnnnnnnnnnnnnnnnnnnnnnnnnnnnnnnnnnnnnnnnnnnnnnnnnnnnnnnnnnnnnnnnnnnnnnnnnnnnnnnnnnnnnnnnnnnnnnnnnnnnnnnnnnnnnnnnnnnnnnnnnnnnnnnnnnnnnnnnnnnnnnnnnnnnnnnnnnnnnnnnnnnnnnnnnnnnnnnnnnnnnnnnnnnnnnnnnnnnnnnnnnnnnnnnnnnnnnnnnnnnnnnnnnnnnnnnnnnnnnnnnnnnnnnnnnnnnnnnnnnnnnnnnnnnnnnnnnnnnnnnnnnnnnnnnnnnnnnnnnnnnnnnnnnnnnnnnnnnnnnnnnnnnnnnnnnnnnnnnnnnnnnnnnnnnnnnnnnnnnnnnnnnnnnnnnnnnnnnnnnnnnnnnnnnnnnnnnnnnnnnnnnnnnnnnnnnnnnnnnnnnnnnnnnnnnnnnnnnnnnnnnnnnnnnnnnnnnnnnnnnnnnnnnnnnnnnnnnnnnnnnnnnnnnnnnnnnnnnnnnnnnnnnnnnnnnnnnnnnnnnnnnnnnnnnnnnnnnnnnnnnnnnnnnnnnnnnnnnnnnnnnnnnnnnnnnnnnnnnnnnnnnnnnnnnnnnnnnnnnnnnnnnnnnnnnnnnnnnnnnnnnnnnnnnnnnnnnnnnnnnnnnnnnnnnnnnnnnnnnnnnnnnnnnnnnnnnnnnnnnnnnnnnnnnnnnnnnnnnnnnnnnnnnnnnnnnnnnnnnnnnnnnnnnnnnnnnnnnnnnnnnnnnnnnnnnnnnnnnnnnnnnnnnnnnnnnnnnnnnnnnnnnnnnnnnnnnnnnnnnnnnnnnnnnnnnnnnnnnnnnnnnnnnnnnnnnnnnnnnnnnnnnnnnnnnnnnnnnnnnnnnnnnnnnnnnnnnnnnnnnnnnnnnnnnnnnnnnnnnnnnnnnnnnnnnnnnnnnnnnnnnnnnnnnnnnnnnnnnnnnnnnnnnnnnnnnnnnnnnnnnnnnnnnnnnnnnnnnnnnnnnnnnnnnnnnnnnnnnnnnnnnnnnnnnnnnnnnnnnnnnnnnnnnnnnnnnnnnnnnnnnnnnnnnnnnnnnnnnnnnnnnnnnnnnnnnnnnnnnnnnnnnnnnnnnnnnnnnnnnnnnnnnnnnnnnnnnnnnnnnnnnnnnnnnnnnnnnnnnnnnnnnnnnnnnnnnnnnnnnnnnnnnnnnnnnnnnnnnnnnnnnnnnnnnnnnnnnnnnnnnnnnnnnnnnnnnnnnnnnnnnnnnnnnnnnnnnnnnnnnnnnnnnnnnnnnnnnnnnnnnnnnnnnnnnnnnnnnnnnnnnnnnnnnnnnnnnnnnnnnnnnnnnnnnnnnnnnnnnnnnnnnnnnnnnnnnnnnnnnnnnnnnnnnnnnnnnnnnnnnnnnnnnnnnnnnnnnnnnnnnnnnnnnnnnnnnnnnnnnnnnnnnnnnnnnnnnnnnnnnnnnnnnnnnnnnnnnnnnnnnnnnnnnnnnnnnnnnnnnnnnnnnnnnnnnnnnnnnnnnnnnnnnnnnnnnnnnnnnnnnnnnnnnnnnnnnnnnnnnnnnnnnnnnnnnnnnnnnnnnnnnnnnnnnnnnnnnnnnnnnnnnnnnnnnnnnnnnnnnnnnnnnnnnnnnnnnnnnnnnnnnnnnnnnnnnnnnnnnnnnnnnnnnnnnnnnnnnnnnnnnnnnnnnnnnnnnnnnnnnnnnnnnnnnnnnnnnnnnnnnnnnnnnnnnnnnnnnnnnnnnnnnnnnnnnnnnnnnnnnnnnnnnnnnnnnnnnnnnnnnnnnnnnnnnnnnnnnnnnnnnnnnnnnnnnnnnnnnnnnnnnnnnnnnnnnnnnnnnnnnnnnnnnnnnnnnnnnnnnnnnnnnnnnnnnnnnnnnnnnnnnnnnnnnnnnnnnnnnnnnnnnnnnnnnnnnnnnnnnnnnnnnnnnnnnnnnnnnnnnnnnnnnnnnnnnnnnnnnnnnnnnnnnnnnnnnnnnnnnnnnnnnnnnnnnnnnnnnnnnnnnnnnnnnnnnnnnnnnnnnnnnnnnnnnnnnnnnnnnnnnnnnnnnnnnnnnnnnnnnnnnnnnnnnnnnnnnnnnnnnnnnnnnnnnnnnnnnnnnnnnnnnnnnnnnnnnnnnnnnnnnnnnnnnnnnnnnnnnnnnnnnnnnnnnnnnnnnnnnnnnnnnnnnnnnnnnnnnnnnnnnnnnnnnnnnnnnnnnnnnnnnnnnnnnnnnnnnnnnnnnnnnnnnnnnnnnnnnnnnnnnnnnnnnnnnnnnnnnnnnnnnnnnnnnnnnnnnnnnnnnnnnnnnnnnnnnnnnnnnnnnnnnnnnnnnnnnnnnnnnnnnnnnnnnnnnnnnnnnnnnnnnnnnnnnnnnnnnnnnnnnnnnnnnnnnnnnnnnnnnnnnnnnnnnnnnnnnnnnnnnnnnnnnnnnnnnnnnnnnnnnnnnnnnnnnnnnnnnnnnnnnnnnnnnnnnnnnnnnnnnnnnnnnnnnnnnnnnnnnnnnnnnnnnnnnnnnnnnnnnnnnnnnnnnnnnnnnnnnnnnnnnnnnnnnnnnnnnnnnnnnnnnnnnnnnnnnnnnnnnnnnnnnnnnnnnnnnnnnnnnnnnnnnnnnnnnnnnnnnnnnnnnnnnnnnnnnnnnnnnnnnnnnnnnnnnnnnnnnnnnnnnnnnnnnnnnnnnnnnnnnnnnnnnnnnnnnnnnnnnnnnnnnnnnnnnnnnnnnnnnnnnnnnnnnnnnnnnnnnnnnnnnnnnnnnnnnnnnnnnnnnnnnnnnnnnnnnnnnnnnnnnnnnnnnnnnnnnnnnnnnnnnnnnnnnnnnnnnnnnnnnnnnnnnnnnnnnnnnnnnnnnnnnnnnnnnnnnnnnnnnnnnnnnnnnnnnnnnnnnnnnnnnnnnnnnnnnnnnnnnnnnnnnnnnnnnnnnnnnnnnnnnnnnnnnnnnnnnnnnnnnnnnnnnnnnnnnnnnnnnnnnnnnnnnnnnnnnnnnnnnnnnnnnnnnnnnnnnnnnnnnnnnnnnnnnnnnnnnnnnnnnnnnnnnnnnnnnnnnnnnnnnnnnnnnnnnnnnnnnnnnnnnnnnnnnnnnnnnnnnnnnnnnnnnnnnnnnnnnnnnnnnnnnnnnnnnnnnnnnnnnnnnnnnnnnnnnnnnnnnnnnnnnnnnnnnnnnnnnnnnnnnnnnnnnnnnnnnnnnnnnnnnnnnnnnnnnnnnnnnnnnnnnnnnnnnnnnnnnnnnnnnnnnnnnnnnnnnnnnnnnnnnnnnnnnnnnnnnnnnnnnnnnnnnnnnnnnnnnnnnnnnnnnnnnnnnnnnnnnnnnnnnnnnnnnnnnnnnnnnnnnnnnnnnnnnnnnnnnnnnnnnnnnnnnnnnnnnnnnnnnnnnnnnnnnnnnnnnnnnnnnnnnnnnnnnnnnnnnnnnnnnnnnnnnnnnnnnnnnnnnnnnnnnnnnnnnnnnnnnnnnnnnnnnnnnnnnnnnnnnnnnnnnnnnnnnnnnnnnnnnnnnnnnnnnnnnnnnnnnnnnnnnnnnnnnnnnnnnnnnnnnnnnnnnnnnnnnnnnnnnnnnnnnnnnnnnnnnnnnnnnnnnnnnnnnnnnnnnnnnnnnnnnnnnnnnnnnnnnnnnnnnnnnnnnnnnnnnnnnnnnnnnnnnnnnnnnnnnnnnnnnnnnnnnnnnnnnnnnnnnnnnnnnnnnnnnnnnnnnnnnnnnnnnnnnnnnnnnnnnnnnnnnnnnnnnnnnnnnnnnnnnnnnnnnnnnnnnnnnnnnnnnnnnnnnnnnnnnnnnnnnnnnnnnnnnnnnnnnnnnnnnnnnnnnnnnnnnnnnnnnnnnnnnnnnnnnnnnnnnnnnnnnnnnnnnnnnnnnnnnnnnnnnnnnnnnnnnnnnnnnnnnnnnnnnnnnnnnnnnnnnnnnnnnnnnnnnnnnnnnnnnnnnnnnnnnnnnnnnnnnnnnnnnnnnnnnnnnnnnnnnnnnnnnnnnnnnnnnnnnnnnnnnnnnnnnnnnnnnnnnnnnnnnnnnnnnnnnnnnnnnnnnnnnnnnnnnnnnnnnnnnnnnnnnnnnnnnnnnnnnnnnnnnnnnnnnnnnnnnnnnnnnnnnnnnnnnnnnnnnnnnnnnnnnnnnnnnnnnnnnnnnnnnnnnnnnnnnnnnnnnnnnnnnnnnnnnnnnnnnnnnnnnnnnnnnnnnnnnnnnnnnnnnnnnnnnnnnnnnnnnnnnnnnnnnnnnnnnnnnnnnnnnnnnnnnnnnnnnnnnnnnnnnnnnnnnnnnnnnnnnnnnnnnnnnnnnnnnnnnnnnnnnnnnnnnnnnnnnnnnnnnnnnnnnnnnnnnnnnnnnnnnnnnnnnnnnnnnnnnnnnnnnnnnnnnnnnnnnnnnnnnnnnnnnnnnnnnnnnnnnnnnnnnnnnnnnnnnnnnnnnnnnnnnnnnnnnnnnnnnnnnnnnnnnnnnnnnnnnnnnnnnnnnnnnnnnnnnnnnnnnnnnnnnnnnnnnnnnnnnnnnnnnnnnnnnnnnnnnnnnnnnnnnnnnnnnnnnnnnnnnnnnnnnnnnnnnnnnnnnnnnnnnnnnnnnnnnnnnnnnnnnnnnnnnnnnnnnnnnnnnnnnnnnnnnnnnnnnnnnnnnnnnnnnnnnnnnnnnnnnnnnnnnnnnnnnnnnngtacatggcatagactttctagttggagaatcagagtacatgtaggtaataggaatcctggagatagatttctttcatgcagcacctctaggagcctatgccacacagacactcttcatctctgaagcaagatgtggcttgcagcatttcccaggtatattttcccatggaaccgaattttccacaccccaaaactttttttcagtacttatttcatgagaggaaataacagataaagcatgggctttgagttcaaacctttccagatttgaatttcaactttactactctctactttttcatctcaagccaggaactttgcctctccaactctcagtttcttcagaggtaaaatacctgttgtaaagatcaagagcaattaggcaagaaaagaaatacttaaaacaatgcctggtgcgcaaaaaaacactcactcagtggctgctgttgcagctactacagcaaaataatcaataccagagctgtatctccctctcacatattttctctgactttcagacatgggtttttagctgcctgttttctgttcacgtatgtgttccacagagacctcgaattcagtatgtatacccaaaatttatataatcttcttttatatcttctctggttgatataaccacatccagtcaactgctaaatctggtcagctgtgtctcctaaatatatctcacatccattcacctctcctcagttttaagactgtgtcatagtttgcctgggctgctactgttgtctctctggagttctttctatgttaccaacctggcttctgcattgcagcccagatgctcagtctaaacacttaggggatcatgctgcttctcaagtttgaactttcagagcctctctaaggcccacaataggggttttcaaacttgctagccctaataccagttgaagtccttaaaattatagattcctggactgtctccgggaatcctttcctctagagattctgatccagatgatcttgggtttggcccaggatatttccattttaagtaagctgccaggtactactaatggtagtcaaatttggaaattcttcacacgtaaataatccacactgtgttgcatggcacctctggccagctatccagtactcttttttttattttatttttatttttatttttttggagacagggtctcactctgttgcctaggctgggagtgcaaggctgcatgcagccttgacgtcagcaggctcaaaacaatcatcccacttcagcctcctgagtcgccagggctgtaaatgtataccatcatgtccagctaatatttaagtttttgtagagacaggatctcgccatatttccaaagctgttcttgaactcctgggctcaagtgatcctcctgccttggtctcccaaagtgctaggattacaggtggagccattgcatgcagcctctagtaccctcttaactcatgctctgagcttccccatacaataagctacatcatcctttagaaagtctgcactttgcactctctcctcctggaatacctttttcttcatctctaattaccccttaccaagtggcaaaagccttgcagtctttcaagaacctgttccagtacctccttcaggcagcctaccctcaatccagtagtttgtcggtgccccccgccacctttttttttttttagatggagtctcgctcgtcacccaggctggagtgcagtggcacgatctcggctcactgcaagctctgcctcccaggtcacgccattctcctgcctcagcctcctgagtagttgggactataggcacccaccaccacacccggctaatttttttttgtattttttgtatttttagtagagacggggtttcaccttgttagctagtatggtcttgatctcctgaccttgtgatccacccgtctcggcctcccaaagtgctggaattacaggcatgagccaccgtgcctggccttgtcagcccctttctatgcaattatagcattttcacatcgtggtgcaatttgtggtttatgtgtgtctctgttccaccagacttgaggacaggaattatttcatttctatagcctcagcatttagctcggtttctgcaaaatgatagaagttagtgaatgtttgttgaaaaaataaaagggaaagaggaaggctagaaagaacccttgcattataccagtagttacaaaaatgttacttggagtcctgaagtgtctcaaggagaactggtggtcagagtggaggcctaactatggaggattcctgcattatccccctctcctgaaaccctcacctctgattcaacccaagaaaatctgcttcttaattttttatatgttggtgaacagagtaaggttctgttgaaaagaagagaaaagctgacactatgtatacatatgtaactaacctgcacattgtgcacatgtaccctaaaacttaaagtataataataataaattaattaaaaaaaaaacagcttaaaaaaataaatttggaaaccatagccctggaccatcgtttgcctttataaaaccccttttttgtgtgtatttctgctttctgtgctttaaaataaagtgggaaaacttaaagaatttgagaaataaagccaagtgatctaaattggaaaatgaatctatgaggggatattagatatttcctactctgttgggtcatacagtgtagtataaccttggggctacttgcttattttcaagcacctggcaggttatcatgagagagatgctaagcagttggcatccatattcatggaggaccgaatgaggaacataaagattaaattgaaaaagttgggagaattcctctaaatttatttgagaaaactgcttccgtttccaaaacagagtctttaggatgtaccctcgttgaggataagaaactcgtctctgccttagtgccgggcatgggctgatacctcattggcagtcaccaaacatttgttgaagggatgcatgaattgccatcagtgaaggcatgtacaaaacgcagtgccatccaagaattacaaatctcaaaaaaggtagttatcttaaaattaagacaccattagacttgtcacagattgaaattatgggattcatttgtaagaacttgatcaataatatgaaattaatgtaacttcatatgctattgtctatagttcatcatcataaaaacaactaaaggtagagtagttgtcttgtaatattgcttactgaagagtaagaattaaccatctctttttctcttgaaagagatcagatagtaacttagaaagatggtttctcattcatattaaagaattactcatatagaggtgtgagtgtttatgaaatctcatgagtaaatttgactctcttggccacagtttctgttacacctttgaagaatacgagtacttgctcttgctctagttgccaagtagattcaatcagcatttatccaactatgtttctacagactccattgccttacacaaaagtgggttgtggggtaaaatgtcacctgtccccttaattcttaaaacatataccaccattttaagcctctgaaaagtcctagagggtagaaacctgtctgtgttcaatacaatatttcccaacaatattttgccactttttttgtaaaacagctattgacaaatcatgggaacattggatagattatttgtcttcaaatagtttgaatattaatggaaagcagaatttatttatcatacccattgtagaagctagcaaaatatataaataaacgggtatataaacagttgtgatagataaatgaaataatttgtgtatgcccaaaggcctctgaagtgaaaaaaacagttattttgagtgttaaaaattgtcaaaaaggccaggtgaaactagagtatgaaagtcttgaggaaatgtaaagctcaggttggcactgtgagaactaaacttaagggcttcctttcattattgaggagaaaaagagaagttcctatgttctgatagagccagcaagcctatttacctagatatttgcttcatctaccattttatttttggacaagaccttggtgtaagtccctccaaatagtaccctgctatgggcagctccaaaaagcagcctgttggggaggtgtctgcttttgagagattcacagagcgtataatgtgaggatgagagcaattgtatgttttccttccgaagaatagtacagaagttatgatagattctcttgaaaatcccttcgaaagacataaacttcctgaaacctacttttatactcatgtatctgtgaaggcatattatcacattatcagataattggggattgttatatgcatggtatacatattagttagatcaacttctgtaacaaaaaatatattatggttcaaacacaataaaagtgtattttcttgcttttataacagccctaggtgggtgaatttgcagttattaaggtagccttcatccacacattcatttagggaccaagactaatggataatctgccatcatcagtacatagcaccaaggttgtactaggggtcatcttcactccaggtctctagaaggggaaaaagcatgaaggcacatatataagaagtttttaggactaagcctagaaattgcacacatcacattcattcacattttggtgtctagaattcagtcacatggctccactcaactgcaatggggggggggctaagatgtatactctagctgtgtacccaagaagaaacagaaaacatggatttagtgagcatctgggggactgtgtctgtcacaacatatttgatgcttgttggtcctttgtcaccaaattagaaggttgatttgtgctatctcatttgctccctcctggctcatggatgtttctgcatagtgtgatggtgatgtacccgtccatttcatggtgaccctcattagcaaacttccacataccacacagaagttcttcaggaaatgtccaccttttttcattcaatatttattgagcacctattatagggttgggctcttagaagtactagaggtacagaggggaacaaatgtccttatccttgggattttattctcttgtgtaagagaaagacaataaacaaagaaagaaaataattagtttgtgctacatgctgtaaaaaagtgagtaagtaaagggaagaggtaaaggagtactgctcttgccaacatatcaaagttggcttctctaggaaactggcatttaggctaagatctgaaggatggcagtgagccagccacttgggctgaaagaacagcattccagagaaaacaacatgcacaaaggtcctaaggcaagaatgagcttggcatgttcaagaaacttgtatctaggacaccagtgtgtgtgtggagaataagcaagaaaggctcatgtgagatgagatggggctgtaagataggccgagtcaattgtttcacacaaggccatgcagatcttggagagtttacgtgttatctgagagtaagagtaaaccacgaaaaagtttgttgtttgtttgttttctgtaacagccttttgtaacataattcacatactatagagtttacccattcaaagggtacagttcagtggcttttattatgttagagttatgcaaccatttccacagtccatcttacaacagtatcatcaactcaaaaagaaatcccataccatttaatagtcactccatttcctccaaacccccagccctaggcaaacactaatctattttcagtctctgtagatttgcctattgtagacgtatcataaaaatggaatcatacagtgtgtggtcttatgtgattggcttccattacttagaatattgttttcaaggttcatcaacattttagtatgtgtcagtacttcattacttttatggctgaataatattttgttatttggctatatctaccacattttatttatccacttgtcagtggatattttggttgttttcaccttctggctattattaataatgctatgaacattcatgtacaaatttttgtgtgaccatatgtttttatttctcttggatatatacctaggagtagaatttctgggtcatatggtttctatgctaaccttttgaggaatttccagactgtttttccaaagtggcagtaccattttgcattcccatcagctgtgtatgatggttccaatttctccatttccttgtcagcacttatgattatctatcattttgaataaagccattctagaggtgtgacgtggtaccctcattgtgcttttgatttgcaattccctgattactaatgatgccgaacatcttttcatgtgtttatttgccatttgtgtattttctttggagaaatatctattcaagttacccacttttgaattgtctttttattattgaattttaagagaactttatatattataggtacaagtcccttatctgtatatgatttataaatatttttgcccattctgtggcttgtttgttgctttgttgatggtgtcttttgatgcacaatagttttttactgtaatgaagtccctttttttgttgttgcttgtgctgttggtgtccttcctacctaagaaaccattacttaattcaaggtcatgagaatttatacctatattttctttctttttttttttttaataacaagtggtgccaatattttaatccagtcagattaacttagtttaaattaaaagtcagatttttgaaactcacataatttcctggagagtttttttttttttttgacagttcctaaggggtataatttattgaagccctattacatagcagttggcattttacatacatgtcacttagtaatcatcacagcagttataataaagatgtatacctatattttctactaagaattttgtagttttagctcttatatgtagatctatgattcatttttacttaatttttacatatggtgtgaaataaaggtccagcttcattcctttgcatgtgaatatctagttgtcccaacactgtttgttgaaatactattcttttctccactgagttgtcttaacacccttgtaaaaaatcagttgacagcatgaaaaggttttaagctgggaaaagatatgatctgattcgtattttaaaaggatcagtctctccaagaatggcttttagagaggcaaaaacggaagtagagctgggaagctgttagaataatccaagttagtcaagtaatggccaagactagtggcagcaaaggagatggcaagctttataaagattgaagatactttgggaagacaattgtcttgactctatgtttttgccactttttcacttgtctgtgtcacagctgtcttttctacctttccccattacattttctcttaaatggtcttgagaatttttttctgttatttttggaagtggttttttttttttttactttactgttttttatttcctgtctgtgataaaactcacaacttatttgtatctacactgttactaaaaccacagcttatttgtatctacacctattgtttccttcttcactctttcctggattctatccctcttcacctactcagtgattttcctttgccagttatatcctgtgtcttcagtagttctccttctataagccttgtcccattagatataaattttcttaggtgtatcccatctttttttgagtcaggttttttaaatgtaatttatacacagtaaaattcaccctttttaatgcatagttcagtgagtcctgacaaatgtatatagttgtgaaaccatcaccacagtcaagaaatagaacatttcatcactctcaaaaagttccctcatgtacctttgcagtcagtccctacccttcttccccagccctagcaactgatttgatttctgttcctatagttttgtcttttccagaatgcaacataaatggagacatagagcctatggccttttttcattgagttttttcatttagtataatgcttttgagattcatccatattattatacatcccagtagtttgttttttaaaattgtgaaatgatactctactatgtagattattcatttatccccctgatggatatttgggttcttacatgttttggccattgtggataatgctgctataaatatttatatatagatctttgggtaaattttttcatttctcctgagtaaacacataggaggagaattactgggtcatttagtatgtatataagaaactgtcaagctgttttccaaagtggatgtaccattttgcattcttaccaacagtttatgagagatttagttctagttacttgacattcttaccaacctttggtatattcattcttcttttttttttgagacggagtttctctcttgttgcccgggctggagtgcaatggtacaatctcggctcactgcaacctctgcctcccgggttcaagtgattctcctgcctcagcctcccgagcagctaggattacaggcacaggccaccatgcccagctaatttttgtgtttttagtagagacgaggtttcaccatgttggccaggctggtctcgaactcctgacctcatgtgatctgcctgcctcggcctctcaaagtgctgggattacaggcgtgagccaccgtgcccggctggtatattcattctttagttatagctattctagtaggtgtgtggtggtatctcactgtggtttttgttttctgttttttttttatgtgtgtgtgtgtgtgatggagttttgctcttttgcccaggctggagtgcagtggggcgatctaggcccactgcagcctccgccccctgggttcaagcgattcttctgtctcagcctcctgagtagctgggattacaggcacccgccactatgcctggctaatttttgtatttttagtagagacagggtttcactatgttggccagactggtctcaaactcctgacctcaggagatctacctgcctcatcctcccaaagtgctgggattacaagtgtgagccaccacacccagccctcactgtgtttttaatttgcatttctctaatggttaatgatattttcttgtgcttatttgccatctctgcacatcctttggtgaagggtctgttcaaatcttgtgtccattttttatttgaatgtttattcttattggacattttgtatgttctcaatccaattttttcttaggtgaatgttttgtgattattttctctcagtctgtagcttgtcctttcattttctcaccagtatcttttaaaaagaaagcttttaatttatgtaaagtctaatttatcattttgttgtgatttgtgatatttgcttaataatctggggcgacagaaagttttctactatgtgctaaatgtggaaacaaatgtgaacaagatatacaagatacttgtcttcatttttcactgagttgtcttctttcacagttttagctcttgtattcgagcctgtgatacattcaagttaatttttataagcaagggtcaaggcttagtttttttcatatggattgttcagcaccatttgctgaacgtactatacacccccccttgatacctttatttgaaattaattgactatgtgtatgtgggttatcccatattttaacaaagactccctcaaccccacatgcccatttaactaaaaatgcatcacttccacctcttcacaaccattctttaaaagtgtggtctagactgtgcttcatcatttctttcctactcctcacactggcatctttctctaccatttcattaaaacagttcttgccagaatcaccagtgatctgtgttcgagagttttgtccttgttacatgtgactctcaatggtcttggaccttgttgacccctccctcctctttcagacactttcttcacttgaccagtgcaacatctcaccatccttcatatttttcttctgtttttccatttgccccatgcatctactttgatagtttttcttttacccgtttcttagatgtcattgtccctcagcaatctgaccaaagccccttttctctttgttctttgcatgttccctgcttattcccatttgttcccctggctgaagaatctcaaatttatatctgacccaaatctttctgagattcatttctgcatgtctaactgcctaccaggaccatagctgtatgaggaaaaagtaccttgtatatgtcttgttcacatttatattcacatgccaagcacacagaacttaataacaatttgtagacggaccaaatgaatacacgaacaaactaaactgatactacatatattccatgagtacatgaccagaggcacaaaataagtaagttacttttggaatcacatgctttgtcttcaccatggcacagttttcctttacagttggtagtaaatcttcggataaagaggtgggaatgagattctgcgcaggggcaggaaggagatgcgagagtaaagagacatttctccaaatgttgcaaacactgtttctaaggttttctagtccaataattgtaatttcctcctgaaattacgtatattatttggagaataaagtatttaatggctctattaaattctgattgtagctttagctataacacatcatttctttttgaatttccaccaaaatttttataagttgctgtaacattttttttctgtctggatctctttttattattattattattatactttaacttttagggtacatgtgcacaatgtgcaggtttgttacatatgtatacatgtgccatgttggtgtgctgcacccattaactcgttatttagcattaggtatatctcctaatgctatccctccccactccgcctaccccacaccagtccctggagtgtgatgttccccttcctgtgtccatgtgttctcattgttctattcccacctatgagctgtaacattttttaagacctaaagcaagcttgtccaacctgtggtccacaggctgcatgcagcccacgatggctttgaatgcagcccaacacaaattcgtaaactttcttaaaacatcgtgagattttttttatttttatttttattttttagctcatcagctaccattagtgttagtgtattttatgtgtggcccaagacagttcttcttcttccaatgcgacccagggtagccaaaagattggacactgctgccctaaagtgattctcaagagttatataaaacagcactccccaatgtttttggcaccagtgaccaatttcatggaagccaatttttccatagactgatgggtggaggtggtggtgtgggatggttttgggatgaagctgttctaccttagatcatcaggcattagttagattctcataaggagcatacaacctatatccctccacaatattgtgaagttcacaatagggtttgtgcgcctgtgaaaatctaatgccgctgctgatctgacaggaggcagagctcaggtggtaatgcttgtccacctgctgctcacctgctgtgcggcccagttcctcacaggccacaggcccgtagcagtctgcagcccagggttggggacttctgatatagaagatgtaaatttggtaatgtagattctttcagctctaatatgatgaaggttttatgatgatctgagtgctcacatcaaagaatgtatatgcttgttatggatttcgcatcatgctgttgttttgggaatatctgggagaaatataagatacagtactccttgctgccctcagggagcacacaccttcaaacagataaaacacacagctacaatcagcaaataaacagaagcacctatcaggcagtttgtagtttcctttgtatgttacttggcaggaaaaaagagggtgtcctgccactagacgtgtgtttttggccttgcttgtcactgcaagctgttatgtaaatatgtttagtgtttttccgtatctgccctttttctttgttctggagtgtgttactcacatttctctatatctttctttcctacatttcagtgagcggtttctggtaagactgaacaagaatggtgggccgaggaacccagagaagatagaacgaatgtgtgccctttttacagtatgtacgaattctctttttcttctttgctgttgactctaaccagtggcctgctatgtggatactgtcaccctggaaacaagcatttagtcttatttccatatacactggggagaataggacttgatttatgtttctattaggttttaatgaaatatttatagaaaactgaaattatatacagttttaaacttaatttttattaatgaaatataatcaagtacctttcactgatacagattttataagctatttcatataatagacacttaaaatctgacagaaccagcctggacaacatgccaaaacccaatctgtagaaacaattcaaaaattagctgggcatgtggcgtgtgtctgtagtcacagctacttggggatgtgaggcaagaggaccgcctgagcccaggaggttgaagctgcagtgagccaaggttgcaccactgtactccagcctaggtgaaaaagtgagaccagaccctgtctcaaaaaaaaaacaaaaaaaaatatgacataggtctttcttactgttcttatccaaggccactgggaatttctctgagctgtataatttctgatgcataatttattttaaaggtatccaccaagtttacagctttgtagtttgttagtgagttcatatacagcaagacaaactaaatagtcctcttccaaatactaattgggggattttttcctactgtgatctgtacttttctttatatatatactttaagttctagggtacatgtacacaacatgcaggtttgttacataggtatacatgtgccatgttggtttgctgtacccattaactcgtgatttacattaagtatttctcctaatgctatccctccccctgaccccacaccacaacaggcccccatgtgtgatgttccctgccctatgtccaagagttctcaatgttcaagtcccacctatcagtgagaacatgcagtgtttggttttctgtccttgtgatagtttgcttagagtgatggtttccagcttcatccatgtgcctgcaaaggacatgaaatcatccttttttatggctgaatagtattccatggtgtatatgtgccacattttcttaatccagtctgtaattggtggacatttgggttggttctaagtctttgctattgtgaatagcgcctcaataaacatacatctccatgtgtcttaatagtagcatgatttataatcctttgggtatatacccagtaatgggatcacagggtcaaatggtatttctagttctagatccttgaggaatcgccacactatcttccacaatggttgaactagtttacactcccatcaacagtgtaaaagcgttcctatttctccacatcctctccagcacctgttgcttcctgactttttaatgattgccattctaactggcgtgagatggtatctcattgtgattttgatttgcatttctctgatgaccagtgatgatgagcattttttcatgtgtctcttagctgcataaatgtcttcttttgagaagtgtctgctcatatcctttgccaactttttgatgggattctttgtttttactcttgtaaatttgtttaatttctttgtagattctggatattagccctttgtcagatgggtaaattgcaaaaatgttctcccattctgtaggttgcctgttcactctgatggcagtttcttttgctgtgcagaagctctttagtttaattagatcccatttgtcaattttggcttttgttgccattgcttttggtgttttagtcatgaagtccttgccaatgcctatgtcctgaatggtactgcctgggttttcttctaggatttttatggttttaggtccaacatttaagtccttaatccatcttgaattaatttttgtataaggtgtaaggaagggatccagtttcagttttctacatatggctagccagttttcccagcaccatttattacatagggaatcctttccccatttcttgtttttgtcaggtttgtcaaagatcagatggttctagatgtgtggtgttatttctgagacctctgttctgttccattggtctatacctctgttttggtaccagtaccatgctgttttggttactgtagccttgtagtatagtttgaagtcaggtaatgtgatgcctccagctttgttcttttggcttaggattgtcttggcaatgtgggctcttttttggttccatatgaactttaaagtagttttttccaattctgtgaagaaagtcattggtagcttgatggggatggcattgaatctataaattaccttgggcaatacggccattttcacgatactgattcttcctatccatgagcatggaatattcttccatttgtttgtgtcctcttttatttcgttgagcagtggtttgtaattctccttgaagaggtccttcacatcccttgtaagttggattcctaggtattttattctctttgtagcaattgtgaatgggagttcactcatgatttggctctctgtctgttattggtgtagaggaatgcttgtgatttttgcacattgattttgtgtcctgaaactttgctgaagttgcttatcagcttaaggagattttgggctgagataatggggttttctaaatatacaatcatgtcatctgcaaacagggacaatttgacttcctcttttcctaattcagtaccctttatttctttctcttgcctgattgccctggccagaacttccaacactatgttgaataggagtggtgagagagggcatccctgtcttgtgccagttttcaatgggaatgcttccaatttttgcccattcagtacgatattggctgtgggtttgtcctaaatagctcctattattttgagatacgttccatcaatacctagtttattgagaatttttagcatgaagggctattgaatttcgtcaaaggccttttctgcatctattgagataatcatgtggtttttgtcattggttctgtttatgtgatggattacatttattgatttgtgtatgttgaaccagccttgcatcccagggatgaagccaacttgatcgtggtggataggctttttcatgtgctgctggattcggtttgccagtattttattgaggatttttgcatcgacgttcatcagggatattggtctaaaaatgcttttttgttgttgtgtctctgccaggctttggtatcaggatgatgctggcctcataaaatgagtnnnnnnnnnnnnnnnnnnnnnnnnnnnnnnnnnnnnnnnnnnnnnnnnnnnnnnnnnnnnnnnnnnnnnnnnnnnnnnnnnnnnnnnnnnnnnnnnnnnnnnnnnnnnnnnnnnnnnnnnnnnnnnnnnnnnnnnnnnnnnnnnnnnnnnnnnnnnnnnnnnnnnnnnnnnnnnnnnnnnnnnnnnnnnnnnnnnnnnnnnnnnnnnnnnnnnnnnnnnnnnnnnnnnnnnnnnnnnnnnnnnnnnnnnnnnnnnnnnnnnnnnnnnnnnnnnnnnnnnnnnnnnnnnnnnnnnnnnnnnnnnnnnnnnnnnnnnnnnnnnnnnnnnnnnnnnnnnnnnnnnnnnnnnnnnnnnnnnnnnnnnnnnnnnnnnnnnnnnnnnnnnnnnnnnnnnnnnnnnnnnnnnnnnnnnnnnnnnnnnnnnnnnnnnnnnnnnnnnnnnnnnnnnnnnnnnnnnnnnnnnnnnnnnnnnnnnnnnnnnnnnnnnnnnnnnnnnnnnnnnnnnnnnnnnnnnnnnnnnnnnnnnnnnnnnnnnnnnnnnnnnnnnnnnnnnnnnnnnnnnnnnnnnnnnnnnnnnnnnnnnnnnnnnnnnnnnnnnnnnnnnnnnnnnnnnnnnnnnnnnnnnnnnnnnnnnnnnnnnnnnnnnnnnnnnnnnnnnnnnnnnnnnnnnnnnnnnnnnnnnnnnnnnnnnnnnnnnnnnnnnnnnnnnnnnnnnnnnnnnnnnnnnnnnnnnnnnnnnnnnnnnnnnnnnnnnnnnnnnnnnnnnnnnnnnnnnnnnnnnnnnnnnnnnnnnnnnnnnnnnnnnnnnnnnnnnnnnnnnnnnnnnnnnnnnnnnnnnnnnnnnnnnnnnnnnnnnnnnnnnnnnnnnnnnnnnnnnnnnnnnnnnnnnnnnnnnnnnnnnnnnnnnnnnnnnnnnnnnnnnnnnnnnnnnnnnnnnnnnnnnnnnnnnnnnnnnnnnnnnnnntgtgggagtctaagtctctttgtaggtctctaaggacttgctttatgaatcttggtgctccttagctcttcttgttgaattgattcatttaccattatgtaatgcccttctttgtctcttttgatctttattggcttaaagtctgccttatcagagactaggatcgcaacccctgctttttttttttgctttccatttgcttggtagatcttcctccatccctttattttgagcctatgtatgtctctgcacataagatgggtctcctgaatacaccacaatgatgggtcttgactctttatccagtttgccagtctgtgtcttttaattggggcatttagcccatttacatttaaggtcaatattgttatgtgtgacctgagggacctgactgttaaaaggaaaactaacaaacagaaaggaagagcatcaacatcaaccaaaaggacatccacaccaaaaccctatctgtaggtcaccagcatcaaagaccaaaggtagataaaaacaccccactgtcaatattagacagatcaatgagacagaaggttataggtagatatttgatcttgtcattttgatgttagctggttatgttgcccattagttgatgcagtttcttcctagcatcgattgtctttacaatttggcatgtttttgcagtggctggtaccagttgttcctttccatgtttagtgcttccttcaggagctcttgtaaggcaggcctggtggtgacaaagtctctcagcatttgcttgtctgtaaaggattttatttctccttcacttatgtagcttagtttggctgcatatgaaattctgggttgaaaattcgtttctttaagaatgttcagtagtggcccccactgtcttctgcttatagagtttctgccaatagatccactgttagtctgatgggcttccctttgtgggtaacctgacttttctctctcgctgcccttaacattttttccttcatttcaactttggtgaatctgacaattatgtgtcttggagttgctcttctcaaggagtatctttgtggcattctctgtatttcctgaatttgaatgttggcctgccttgctagggtggggaagttctcctggataatatcctgcagagtgttttccagcttggttccattctccccgtcactttcaggtacaccaatcagacgtagtatttggtcttttcacatagtcccatatttcttggaggctttgtttatttttactttttttttctctaaacttctcttctcactttatttcattaattttatcttcaatcactgataccttttcttccacttgatcaaattggctattgaagcttgtgcatgtgtcatgtagctctcgagccatggttttcagctccatcaggtcatttaaggtcttctctacactgtgtattctagttagccattcatcaaatcttttttcaaagtttttagcttctttgagatgggtttgaagatcctcctttagctcggagaagtttgttattactgaccttctgaagcctacttctgtcaactcatcaaagtcattctccgtcctgctttgttccattgctggtgaggacctgcagtcctttggaggagaagaggtgctctggtttttagaattttcagcttttctgctctggcttctccccatctttgtggttttatctaactttggtattttatgctggtgatctacagatggggttttggtgttgatgtcctttttgttgatgttgatgctattcccttctgtttgttagttttccttctaacagtcaagtccctctgctgcaggtctgttggagtttgctggaggtccattccagaccctgtttgcctgagtatcaccagcggaggctgcaaaacagcaaatattgctgcctgatccttcctctggaggcttcgtctcagaggggcacccacctgtatgaggtggtagtcagcccctactgggaggtgtctcccagttaggctacacgagggtcagggacccacttgaggaggcagtctgtccattctcagagctcaaacactgtgcagggagaaccactgctctcttcagtgctgtcagacagggacgtttaagtctgcagaagtttctgctgccttttgttcagctatgccctgcccgcctaggtggggtctacagaggcagcaggccttgcagagctgtggtgggctctgcccgttggagcttccccagccgctttgtttacctactcaagcctcagcaatggcaggtgccccttgcccgctacgctgctgcctcgcaggtcgatcttagactgctgcactagcactgagcaaggctctgtgggcatgggacccgtccaggatatcccaggcacaggatgtaatctcctggtgtgccatttgctaagaccgttgtaaaagtgcagtatttgggcgagagtgtcccgattttccaggtacagtctgtcatggcttcccttggctaagaaagggaaatcccccgacccattgcacttcccaggtgaagcgatgccccacactgcttcggcttgccctccttgggctgcacccactgtccaaccagtcccaatgagatgaaccaggtaccttagttggaaatgcagaaatcaccatcttctgcgtcgatcatgctgggagctgcagaccggagctgttcctattcggctatcttggaacagaatccccttgtttctgtacttcagttttttctgaaaagccatactgttgttcatggtctgtacaaccatggaccaatcaacttagaaaaggtttggaaatctgctgattggaaaataccaaacctcacaatcccaccttgccatgtgtgttcttcaagtttattctgatttactaatttgtttttaccttgttaaaaactatccagtggtatttatttgagttaatttatttgctgtagaagaaaacaagactgtgtcacaattttcaaccagttttgattattgtggattctttgatctgtttcagtgatcctgagatacatcaaaacctattggatagtttcacagtgtcactgaccttgcttatggtgtgtgattgatgggacagatatcgcaaagattacattgggcctcttaaatgcaaatgggatttatctggagatctgatacatgactttctataaaagctgcagttatatttgttcacctcactttttagttcattactgcaactttatctttcagaacatcaaatgatgttactgcagaatcagaaaccactttcacagggatagcttttattgataatgctccagatgtatggaaagatttataaatctagctaagcttaaataatatgttgtccatctttgagcttagcagtaaaggcttaggagataatgcaaggagaaagaacaggaagagcagacccatgatggcggttaagggagttaagatggcttagtctgggaagatcagcactctgtcttcaattggaaaagaatgaaagaaagaatctaaattgtagtaaatgggatttaggttagtctattggctgagagcttctgaagtgagagttcctgaacactgaggtggttttgtaggacctcctttctgaaacagaattagtaagagacacccaccttctagaatgtctcagtaaccttaggaggtttttctaaattctgattctctgatatttcctggtaaagcatcaggagaaattgttgattccttgtttcttggatttgtgggaacagagctgcgtgcatgtactgtctttgaattcttgaatatgatgagtacagtctttgactttttaaaaatgaacttaattagggtggtatttgaatgtaattacagtaaattaaaattttcatttagcattttaattatccatatgagcccagaggccaaagctatagctccaactttattgcacataacatgcatgatgtgctcttgttctgccacaatgggaaggcacagggtgctaaatatgctattaatacttccataattctgtttgtagtgcagccctgaatttatttattttttattttttatttttgcagtcagggtctcactctgtggcccaggcttcagtgcagtggcctgatcatagctcacataaaaaccttgaacctttgggctctaagcaatcctcctgcctcggtctcctgagtagtggggctataggcgcacaccatgcttggctaattttttttttttaagagatggcgtcttgctattttgcccaggctggtcttgaactgctggcctcaaacaaccctcccaccttggcctcccaaagtgctgggattacaggtatgagtcactgtacccagcccagccctgccctggattttttaaaaaggtccgaaacatgatttgaggattttttacaaagcacacaagatttctgaacaagattatcttagccaggatttttatgttttactttaagctctatgaaattatataggtgggacctgttttctcattatctgagacttgagttcttcctatgagctaaaggagtttcctagattgatgtgtgtgctgcaaagtctcagagtaaatgcaagaaaatgtagccacaactatggttgatgctgaccttttagcttaccttagaatagggaaaagggaatcatacaaactgagcagattacgaggttactcagcacacttcagagccacattaaagtcacattatttggcatggcctttattctctttgaggccttagtttttctgacttggttagattttagggtttcctaccaaggaagaattttatccaaggagaatatgttttatacttacgtggacggccaatacaatgaggattttgctgactttcatgctaaacaatggctctatatacaaatgtgtgaaagtatatctattcgtatttactcatttttagatattcaggacctcatacacactgccggcaaggtgtcagtaatgatttgttacataaacaaatgaataaatgtttatttgctgtcatatttaagtgaccaactcagagaatgaatttgtacagttttccaagtattagttgtcattttattttatatatttatttatactcttctacattccaagatagaattttaagtagtgattttttagagttcagaattgaacttgattattactataataacattatgtattaaaatactaccttattttctgcaacttacgtatgaataagctggttttattttgtatttgaaaatcccattatctcccaaaaaaaaggagtgtcccaggcacagggaagttaattaactttttcgtgtttcagatgagtgagtctaagatgctcgaccctaagtcattgtcctcaattgtctcttctacacactgtttagttgggagcagcttcctagttaagtaggattagagagtttggtccagtgaacaaatctaattcatgccatgtaatcaggactgaaatcctgctcaccagatgaatggtagatacatcacccttcttatctttcttttacaggtcatgtgagtaatataatgtagataaccacccttggtgcttagtcttgaagaatatatgtttaacaaaccttatggtaactgtgtttagtcatacacctatatttaataagatagcttttatattgaaattctgtggaactcacaaataataattttgcttaaaatattttcttgcactaattattgtcttatttctattgatgtcaaataaattccactgaaagttctggatgctgtgtacatgattgtcagaaagagcccctactcagccacttgaaaaataccataaattatacttaaggcttcttttattcactcagcagagtcaagggaaacatttagcttgaattccataggtacattggagtcagtgattatacgagtcatttgatagtttggatgtacacaatccaggctgtgtaggaggaaccatttcactttgaaatgtgttgaacatttctatatccttcagtaatcaacatctttcaattcaaaaaagtatataaaaatggtaacctggttttcaattttcacttggatagtaccatcttaataagtatcaaaatatagcactattttaataatattatttttaattccatgtttaaaagaattagtgaaatggggcctgaaacatcctttttcaatatcaaacacaactttcatgtaaaaatatatctttgtgattccagatatcaatttatgtttaattattttgtaacctgtttcattataaacatactttattattttaagaacttgacaaaatattataaccatctaaaagcttcagtttcaccactacatattacttttttttttgagacggagtctctctgtcactggagtacagtggcacaatctgggctcactgcagcctccacctcccaggttcaagccattctcctgcttcagcctcccgagtagctgggattacaagtgcgtgccgccacaccctgctaatttttgtatttttagtagagatggggtttcaccatgttggccaggctggtctcgaactcctgacctcaagcgatcctcccacctcggcctcccagagtgctgggattacagacatatgccgccatgcctggcccacatattacttcttagtgtctccttttctttcatatgtttaaggccatttaatagggcgaggctgggactaggctaaggcaaacaaagcacaggatcttgaggagcgagtgccttcttaaattttgtaccttaggtgccttgcttgcctcacactagtgctaaccctgcaacagggtttacaaattaagaaacatggagactctgaatctctaagctcattccaaatcatgactgccatttgattgtacctttttttttttttttttttttgagacggagtctcgctcttttgcccaggccggactgcagtagcgctgtctctttctcggctcactgcaagctctgcctcccgggttcatgccattctcctgcctcagcctcccgagtagctgggactacattttttttttaattgaagagagacaggcatctggggtcaatcaaaagatgaaagaggaaaaggaaatggaactaagggagcctttcctagaagcgaaagggagatcacagaaacctgtcacattaaggacaaaggttattccatcaagtatcattaactcgcaataatggctgagagagcagcaagaaaaatctgaaacagaatatatattaaagaatttttgttatttcaagtacaatacatttaaaaagcataatgcgtactcatcaacaaacatttcaacatatgttctaaacacaaatagaatgattatcagattgggcatggtaactaacacctgtaatctcaacactttgggaggctgaggcaggaagattgcttgagcctagaagtttgagaccagctctggcaacatagcaagaccccatctctacaaataattttaaaaatagctgggcatgatggtgcacacctgtagtaccagttacttgggaggctgaggtgggagaatcgcttgacccagaggacaaggctgcagtgagccgtgatcgcaccactgcactccatcctggtgacagagcaagatcttgttttttaaagaaaaggaagaaagaaagaaagaaaaaggaatgattttcataactctttggtttggaaattttctgattctggatcatatgtgtttacttaaaggaaacccttaatttttttcaataagattattttcaactataatttagtacaaatgataaatatcagaatttagaaatagaaatcaaattattgaggtttcactgatatcaaattaatctcttttaagtggaacaacttcgtgtgtaataatcatttgtggacagaggaatcaatgtaaaattagtggagaacaaacttacagaattttagttattgatgagctttttggtgttttcccaattttttctttactgaacatttattccttctgttacagaatgtttttatatgatgttagagtaaacatggaataaggcgatatcatgaagatttctaatgtgagaacttttatagactttttatttgttaagtggtctaaatgagagctggaaaaatgttgtcaatagaataaacttccaaagccatataagatatccagactttcactgcagacatcttataaaccattaaagtgctatatgctgtaatctcccttcccctgcctataacatacagtaaaagcaaatgactagagattcaaaatgaatttttaattattttctgtgtattccttgcctgaatttacttattttttctcttaggatctgagcagcaaagatatgaagagagatttgtatatcgttgcccatgtgatccgaataggtactgttcaccttacccattcacatgactaagaatggcccaacttgggataagtatgtcttgtgcatgagctttgttttctccctagatcttacctgtaatttcaggtctcaggattagagtccagcttgtattgaagctatacctaagctcaactgctatggtagcttggtttgatataaatggattcgggggggtgggttttgtttgtgttttttaatcacttaaaaccttctgctccctgtttttagacccaaactttttatttaaaatggtctacttctagacattatttctaacacagtgccctaccctttccctcagagatcttatagcaggtttccagaggtgccaacttcacagcaaaggccattcaccacctattgtttgtgtttgaaattatgtatctgtggctctctccacaaaattagagttattgtcatcactccagaagatggatgacatttcacttctaccccacccaagatgaaaaagtgatttttactactgttctgtggttggtttgctcagacttatttcaagtttatgatacaacttttggggctatggtgaaccaagtcctccttcataggtttgagttttggcctatcatgtacatttttatcaaagaatattttttaatcccttgccaacaaaacagctatttgctgtactaaataaagtgtttgttaaggttccagcatttgcaagtcttcttgccactgtaggcacagctttggtaagcaggaaaagtaaacactcatccactttctaagactactctcagtcccacaattgttcaagatgatgtttgacagcagaatttggttgaaagaacacagtatcctccttgtctgtgcatatgcagtttatacctggcagctaaaatactaaactttgtatctaaaacatacctgagaagtttaaatttattattagcacactggtttttctaagaaattcataaaatcacttttattctcatgtgattaataaatggagtgttgatattggtttagagttagataagaatgattgattgaatgtagtacagggaagagctttggccagaggcctgtttggtgttcttccacataaatatccttggatgactcccttcagccctgtagtcttcaccttagaggatttcctaggtgcctgtagctcaggcatccttggatgacaattaggtgatactggagaggagcatgcttttctcagtctgactggtgttttctgctgtgcccaaggccggatgctcctgaacgactcaaagaaaggtcctcctcacctgcactacaggcgaccatatggctgtgcggtcctaagcatcttggatgtcctacagtcactcacagaagtaaaggaagaaaaggattttgttcttaaggtttacacgtgagtaatggacatcaggaatattaatgatttgtagcataagacatcccagcactgcccttgagagtagtagtgctcaaaccttgtggacacaggccacgcagtggctcacgcctgtattcccaacactttgggaggccaaggtgggcaaatcacaaggtcaggaaatcgagaccattctggctaacacggtgaaacctcgtctctactgaaaatacaaaaaattagccaggcgtggtggcacgtgcctgtaatcccagctactcaggaggctgaggcaggagaattgcttgaacctgggaggcagaggttgcagtgagctgagattgcatcactgcactctagcctgggcaacagagcgacactccgtttcaaagaaaaaaaaaaaaaaaaaaaacaccttgtggacacagaatcaccaggatgtaggaaaaggagctttttgaaaatgcagaagattggccgggcacggtggctcacgcctgtaatcccagcactttgggaggccaaggcaggcggatcacgaggtcaggagatcgagaccatcttggctaacacagtgaaaccctgtctctactaaaaatacaaaaaattagctgggtgtggtggcggacgcctatagtcccagctactcgggaggctgaggcaggagaatggcgtgaacctgggaggcggagcttgcagtgagctgagatcatgccactgcactccagcctgggcgacagagtgagactccgtctcaaaaaaaaaaaagaaagaaaaaaagaacaaaaaaataaaatgcggaagattgatctaagatttggggtggggcccaggcagcattatttttaataagcttcccaggtaattctgaaacagcttcatttgggaccttctatcccaaagtgaaaatctggtagtacacattttcttttttctccagaattaaccaatcttatatatttgcagaaaagctaacaatatgcttctcatgtgtcttggctatgagagtcttgcatgtctaatgcttgcccaccagttattataactgagctggctaatgatcaagattgtttaaaagaatgatcatgagtcgaatttctctatctttgaaagatagcccatttttctgaggagctaagatattattcttcacttgtgccactggagatcgataagtcacatccaaccaggcatggcattatttttagtgttcttcaaccaaaggatattgtcttagataagcagtccatctccttctaacttgttaaacaataggaaaaacacaataatgaaaataaatgcagaattcagtcatatactctatctttgctcatatagttagacacaaattgtagtgctaaaaaaatgatcagtggtgagtttagtaagtttttaaagcaagtatatttaaaactgtgagaatttttaaaaactcatctttcagtttaaaaacccaatattgtttatccaaattaaataaaatacttccaatcaccatgttaatgtatcttcaccataatatcgtatagatatttttctgtattatctgttgctctgtctgacttgggcatgaaataagcttaattcacaatttctgttaagccacatttgattaatttcaaaataaaaacccaatctcctcattacctattttcccttaagctttgttcctttcagagttgtatactttatgggatgaggatcttcctttggaatcataacttacaaagaaaattttggctggttttctcctccttccatgcatcagtcacaggctttctccatttaccaaatccccaaattgatgggtggtggaacctgcttgtttatatgccttcctccctttgaaaaggactaaagagaaatccaaaatcatcatcattatcatcttactccactgtattccttccaagggcaagggatttatagatagcactccagaattgttatctctttgcatgtattatgccttccttgttttggtgcaaattttcattacagataggagcttgcacagcattcctcctgaaatcatgctgtcaggcttaattggcctaattgcttctaaagcaacagctttctgcaagaaacaggattcatgtatgtatttttcttagttccttcttatggatggtctgtgtctaataaagtagttctaaaaagatgaaaaaaatatgtttatagagaagattttttttcaaattttcttttgaaggattaatagagttaaaatgtacaataatttttccacttgaaaatgttaacagactttcaagcagactatcaaatgcatgtttgtgaaattgattttgtgtgcaatatagaattattctaggattagtcattttaatccacatcagcacagtgaatctagccctcaggagaagcaatattttccagtaagtttcaggcaacatttttgttggttagattgaattggaagcttaaagagtttactaattgctattgatagttctttagcctttgctaggacgggattttacaaagatgaaaacctcttacacagttttaatgaatgagttggcaaatatccgattagttgttcacattcttatcatttctttcattgttcatagtcagccttagccagagaaggtagaaactcctgtctgtctctgccaaggccactattctgctgtataatgttttcacttgtgtatgggaaggcaccacacatccttttaagaaaatagcaaaaaaaaaaaaaattgcaataagaagctgaggcatgaaaactaagtcacttcctaatgagtcaaaagccttaaaactcacaaataaataaccatatgtacatttcagtctgatatagataccatatttttcttgacccgaaggacaaggggtcacaagcaggcacagggcatgctgtacttagaacccaaaaggagaggagtgccaggagctaaagccaacattggagggggtgggtgtccataaataatgcacgtaaccaaatacaagatggctttgaatatgtgatgatcactgtccagttttacaatgaaaaatgtccaaatatatttaggccaaccttaatgaaacagataaatacatattttgaatattaaatttttaatttggattacagtatattttatattataaaatatgtattacaaattatgtactcaatcacatattatgtaaaattgagatatattgctcattcttggctctcaaattttatgaaaaaatttatttaaattattcatatgcagccatgtcatcgggtctttgtcttcacttaagccactttctgaattatctgacacagttttccaaggcacattatttttactcccaccagattggctttaatgcatcattctttgacactttcatgatgctttcacactggaaattcatcttgaggcacaagatgataccgccacttactatgctacttttatggtgatttttacaatagcatttaacacgtcaatttggtgatcataccccaaccataattactaaatctgtgtagctttgctcttttttaaaaaaatgtcttttaaccaattctgccagataaccttcataagcatctaaaaactcccattgattgaggtaatttcagattaacataacttacccgaacagtgctgtgatgttcaaaataaagagatnnnnnnnnnnnnnnnnnnnntgggaggctgaggcaggcggatcatgaggtcaggagatcgagaccatcctggctaacacgggtgaaaccccgtctctagtaaaaatacaaaaaaattagccagccatgatggtgggcacctgtagtcccagctacttgggaaggccgaggcaggagaatggcgtgaacccgggaggcagaacttgtagtgagctgagatggcgccactgcactccagcctaggtgacagagcgagactccgtctcaaaaaaaaaaaaaaaaaaaggaggagagtcagagaatgccccatatcatgaaaggctttttgaggccagaaatatcaagtggcatacacctactatgtacccacaaaaattaaaaatgtaaagaaataaacttcttttaattaaagcaatattaggtggcaacctcttctgtgagtgatgactggaagggaactgctcctcatatttgggatagacactaggcctattcaggcattttttgagaatactgtgctttgggttctttgcttcataaccatcctatccacgaaactgtcttaagagtacttgtttaggagccttttttttttttttttttttgagacggagtctcactctgccaaggctggagtgcagtggcgcaatctcacctcactgcagcctccgcctcccagattcaagccattctcctctctcagcctcccgagtagctgggactacaggcactcgctgccacgcccggctaatttttgtatttttggtagagatggggtttcaccatgttggctaggatggtcttgatctcctaacctcgtactcagcctcccaaagtgatggggttacaggcgtgagccaccacgccctggccaggagtcattcttaaatggaagcacattctgaaatgggtgaaggcccattgggccatcctctttttatcccctagccttattgagttataattgacaaataaaaaattgtgcacatttaaattgtacaacatgatgatttgatatacataaacattgtcggatgattaccacattcaagctaaggaacatattcatcacttgacatatttacttttcttgtggtaagaacacctaatgtttaccattttagcaaatatacaatatagcgttattaactatagctaccatgctgtacataaatctccagaagttatttatcttacaactgaaagtttgtgtcctgagatgaacatttctccattacctcctcttttccactatcctctagcccctggcaaccaccgttctactctctgcttctatgaatgacttttttagattcctcatattagtgagagattatgtagtatttgtcttccatatctgacttattttgcttagcacagtgccccctaggcttgtccatgttgtcacaaaagcaggattcccttttttattatggatgaataatctgttatatgtataattgatacataatttttaattctataccattatttattatatttcaaaagataaaatagatgtatttatctcagtggccatctcaagtaaatataattacattgggaattgacagatgaataataaagaaaatatataattcctcattcatccgtcacttcccattgtaattatatattctttattatgtataattatatatattatttttattcaaagaactatatgtatatatattcttttttttttttttttgagacagagtctcacacttgtcacccaggctggaatgcagtggcgcaatctcagctcactgcaacctccacttcccgggttcaagcaattctcctgcctcagcctcccgagtagctggtattacaggtgcccaccaccatgcccagctaatatttgtatttttggtagagatgaggtttcaccatgttggccaggctggtctcgaactcctgacctcagatgatccgcctgcctcagcctcccaaagtgctgggattataggcatgagtcaccatgcctggcctatgtatattctttattattcatctgttgatggctgcttgtttccatatcatggctagtgtatataatactgcaataaacctgggagtgcagatatctcttcaagatactgatttctttttctttgggatataccagaagtgcgattgctggatcaaatagttgttctatttttaattttttgaggaactgccataccataatggctgcaccaatttacatttccatcaacagtgttcaacagttcccttgtcttcacactcttgtcatcacttgttatctcttgttttgtgattacagccatcctaagagatgtgaggtgatatctcattttctttttgatttgtattttcctgatggttggtgatattgagtaccttttcatatacctgttggccatttgtgtgtcttctttgggaaaacgtctttcaggcctttttgcctgttttgtaattgagttatttgtttttatgcaattcagttatatgagttctttatatagttttagatattaatcccctatcagatatatggtttacaaatatttcttctcattccatagattgcctttttgttttgttgattgtttcctttgctgtgaagaaggtttttagtttgatatagttccatttatttattttggcttgcctgtgtatctgttgtcatatctcaaaaaatcactgctaagacccaatgtcaaggagcttttatttctgttttctcctagttttacagttttaggtcttatatttaagcatttaatctctttcgagttagtttttgtgttttatgtcagataaggtcctatttcatccttttatatgtggatgtacagttttcccagcatcacttattgaaaactgtcctttccccattgtgtattcttggtacccttgtcaaagactagttcactgagtttatttctgggatctgtattctgttccattggtctatgtgtctgtttttatggcattaccatattattttgattactgtaactttacaacattatttgaaatcaggaagtgtgatgcccctagctttgtccttatttcacaagattgctttgggtattcagagacttttgtggttccatacaaatttcaggattgttcctttctattcctgtgaaaaatgtcatttggaatattgatacaggctgccttgaatctgtagatcacttttggtattatatggatattttgaaaatattaattcttccaatttatgaacactggattttttttcatttatttgtgtctttttcaatttctttcatcagtgttttataattttcagtaaatagatcattcactttcttggttaaattattcctaaatattatatatttttgatgctatcataaatgacattgttttcttaacttttttggagagcttgtcattagtatatagaaatattgctgattttttatgttgattttgtctcctgctactttaccgaattttattctaacagttttttgattgaatctttaggctttttatatgtatataaggtcatgtcatctgcaaacagagacagttgaactccttcacttccagtctggatgtgtctaatttttgtttgcctgattgctctggctagaacttctagtactgtgttgaacaaaagtgatgagagtggacatctttgtcatgtttctgatcctagaaaaaaggcttttagcttttcactattgaatatgatattagctgtgggctcatggtaaatggcctttatttcttatatatctaatttattgagagttttcatcatgaaaggatgttaaattttgtcaaacactttttctacatctgttgaaatggtcactcagtgctatgcactatcaaactactagtgacattcttcacagaactagaaaaaactattttaaaactcacatggaaccaaaaaagagcccgaatggctaaggcaatcctaagcaaaaagagcaaagctggaggcatcatgctacctgacttcaagctatactacaggactgcagtaaccaaaacagcatggtactggtacaaaaacagacacatagacaaatagaacagaatacagagcccagaaataaggcagcatgcctacaacaatctgatcttcaacaaagctgacgaaagcaagcaatggggaaaggactccctattcaataaatgacactgggataactttctagcaataagtataagattgaaattggaccccttccttacaccatatacaaaaatcaactcaagatggattaaagacttaagcatgaaacccgaaactataaaaactctggtagacaacctaggcaataccattctagacataggaatgggcaaagatttcatgatgaaaatgacaaaagccatcgcaacaaatgcgaaaattgacaaatgggatctaattaaactagagagtctgcatggaaaaagacactatcaacagagtaaacagagaacctatagaaataggagaaaatatttgcaaactatgcatctgacaaaggtccaatatctagcattgataaggaacttaaacaaatttacaagaaaaaggaatgccattaaaaactgggcaaaggacatgtatagacaccttcaaaagaagacatacatgtggccaacaagcatatgaaaaaaagctaaacatcactgatcattagagaaatgccaaccaaaatcacaatgagataccatctcacaccagtcagagtggctatcattaaaaagtaaaaaaataacagatgctggtgaagttgcagagaagagggaacacttatacactgttggtgtgagtataaattagttcaaccattgtggaaagcagtatgttgattcctcaaaaacctaaaagcagaactaccatttgacccagcaattccattactggatgtatacccaaaggaatatgaatttttctatcataaagacacatgcacatgtatgttcattgtagcactattcacaatagcaaagacatgtaatcatcctaaatgcccatcaatggtagactgcataaagaaaatgtggcacatatacaccatggaatactatgcaatcataaaaaagaaaaagatcctgtcctttgcaggaacgtgggtggaggtggaggccatcaatcttagcaaactaactcagagacagaaaaccaaataccacatgttctcacttatatgtgggagctaagtggtgagaacacatggacacaaagaggggaacagcagacactggggcccacctgaggatgagggtgggacgagggagatgagtagaaaaaataactattgggtactaggcctagtacctgggtaatgaaataatctgtacagccaacccttatgatacgagtttacctatatagcaaatctgcacatttacccctgaacctaaaataaaagttaaaaaaaaaaaaagaaatggtcatattatttgtatccttcattttcttaatgtggtacgtcacatttattgattcatgtatgtttaaccatcgtgctatcccagggatgaatctcacttgattgtggtatatgatcctttcagtgtgttattggatgtggtttgctagtattttgttgagaagttctgcatctgtgttcatcagaaattttgcatctgtgttcatcagacttgtaattttcttttttttatgggtttaatatctaaaatctgaaatgctccaaaatctgaaattttttagtgctgatatgattctcaaaagaaaatgttcattggacatattgggtttcagattttcagattaggaatgttcaaccagtaagtataatgcaaatattccaacatctgaaaaaattaaaaatctgaaacaattctagtcccaagcattttagataagggttactcaacctatagtctttttatctgactttactatcaggataatgttggcattgtaaaatgggtttgaaaatgatcccttcacttcatttttttttgcgggggagtttgagaaggattgacattaattatttttcaaatgtttagtagacttcacccatgaagccttttggtcctgggcatttctttgttgggagatttttgattactgcttctgtattcttattattgatttttttttattctttatgattcaatcttggtaagttgtatgtttctaggaatttatccattttcttaggttatctaatttcttaacatataattgtacatagaagtttgttatgataactttgtgtttctgtagtatcagttgtaatgtttcctctttcatttataattttatttatttgagtcttctctctttgtgttcttggttaattcaactaaagatttgtcagccgggcgcggtggctcacgcctgtaatcccagcgctttgggaggcgaaggcgggcnnnnnnnnnnnnnnnnnnnnnnnnnnnnnnnnnnnnnnnnnnnnnnnnnnnnnnnnnnnnnnnnnnnnnnnnnnnnnnnnnnnnnnnnnnnnnnnnnnnnnnnnnnnnnnnnnnnnnnnnnnnnnnnnnnnnnnnnnnnnnnnnnnnnnnnnnnnnnnnnnnnnnnnnnnnnnnnnnnnnnnnnnnnnnnnnnnnnnnnnnnnnnnnnnnnnnnnnnnnncaaagtggttgtgttgggtatttgccaggaccctggtctgtgttctctgtcacagagcagagagtgaagctggactaggtaggctcatgctcagaccttcaaatggtgagaacagcaccagccatcatggacagggcactccgcaggccccaggtggagtgctcaggtgaggggtgttagcagctatgctaacaccctgtcacaatagagggtggggtcattcttggtgaccagagcctgggccagcgggtgggaatgcacattcctcacaccttagtcccaatggggcttgctccctggccctggcaggggtagcccacctcagctgcaggagccccacccaactggtgatcaagtcccagtggcaaattttaccccacttgcatcccagtctccatcctggtggcactcacttctcagcaccaacagcttcaccccatgccttacttgcttcttagctctggctgtaggtatgcttccagcatactccccagtcccattagcgacagctcgagtttctgtcatgcctcagtcctggcactactgggctgcaggacagcaagcagtctgccaaaggctgcgtttgaaaatgatgccttgctcctcagacacttcagggatgagatgtcaggggaagttggagaagcaaatagacccaggaaagttatccacctcttggtgaacctgcttctgcaccttgcacacctgcagaactgcttaaccacgggtgcttttcactctgttctctttacctccttgttctgggattcagggacaattctttgaacacggtttgtgaagtgacaaaacccagcagggaagagcagacaggtctggcctcattttcccgcttccaggatgtcccaacatcttcctagggatctcccactaacttcaagtcaaagagtgacagagactgcaacagagccacttgggcctcttagagcagaggatacagagcagtggggtttcttttgaatgtgatattattatttatcattcactgacaggtcaccaaaaaaaaaaaaaaaaaacagggaaagggagggatggagctagtgagactatgactaatacaatctgtgtgcatttctgtgggtttgaaaacccgcttgctctttatacgaattcaaactaaggaattgtgagtaagaatagctttagaaggtgcacatctaggctgtgtgtagtgagccactgctcatgcctgtaatcctagcactttgggaggctgagtcaggcggatcacttgggtcaggggttcaagaccagcctggacaacatggtgaaagcctgtctgtactaaaaatacaaaaattagccaagtgtggcagtgggtgcctgtaatcccagctactcaggaggctgaggcatgagaatcgcttgaaaccagggaggtggaggttgcagtgacccgaagacgtgccattgcactccagcctgggcaacagagggagactccgactcaataaaagaaaaaaaaagaggggaggagccgagatggccgagtaggaacacctccggtctacagctcccagcgtcagcgacacagaagacgggtgatttctgcatttccatctgaggtaccgggttcatctcactagggagtgccagacaatgggcgcaggtcagtgggtgcagcacaccgtgcgtgagccgaagcagggcgaggcattgcattactcgggaagcgcaaggggtcagggagttccgtttcctagtcaaagaaaggggtgacagacggcacctggaaaatcgggtcactcccacccaaatactgcgcttttccgatgggcttaaaaaacgacacatcaggagattatatcctgcacctggctcggagggtcctacacccacggagtctcgctgattgctagcacagcagtctgagatcaaactgcaaggcggcagcgaggctgggggaggggcgcccgccattgcccaggcttgtgtaagtaaacaaagcagccaggannnnnnnnnnnnnnnnnnnnnnnnnnnnnnnnnnnnnnnnnnnnnnnnnnnnnnnnnnnnnnnnnnnnnnnnnnnnnnnnnnnnnnnnnnnnnnnnnnnnnnnnnnnnnnnnnnnnnnnnnnnnnnnnnnnnnnnnnnnnnnnnnnnnnnnnnnnnnnnnnnnnnnnnnnnnnnnnnnnnnnnnnnnnnnnnnnnnnnnnnnnnnnnnnnnnnnnnnnnnnnnnnnnnnnnnnnnnnnnnnnnnnnnnnnnnnnnnnnnnnnnnnnnnnnnnnnnnnnnnnnnnnnnnnnnnnnnnnnnnnnnnnnnnnnnnnnnnnnnnnnnnnnnnnnnnnnnnnnnnnnnnnnnnnnnnnnnnnnnnnnnnnnnnnnnnnnnnnnnnnnnnnnnnnnnnnnnnnnnnnnnnnnnnnnnnnnnnnnnnnnnnnnnnnnnnnnnnnnnnnnnnnnnnnnnnnnnnnnnnnnnnnnnnnnnnnnnnnnnnnnnnnnnnnnnnnnnnnnnnnnnnnnnnnnnnnnnnnnnnnnnnnnnnnnnnnnnnnnnnnnnnnnnnnnnnnnnnnnnnnnnnnnnnnnnnnnnnnnnnnnnnnnnnnnnnnnnnnnnnnnnnnnnnnnnnnnnnnnnnnnnnnnnnnnnnnnnnnnnnnnnnnnnnnnnnnnnnnnnnnnnnnnnnnnnnnnnnnnnnnnnnnnnnnnnnnnnnnnnnnnnnnnnnnnnnnnnnnnnnnnnnnnnnnnnnnnnnnnnnnnnnnnnnnnnnnnnnnnnnnnnnnnnnnnnnnnnnnnnnnnnnnnnnnnnnnnnnnnnnnnnnnnnnnnnnnnnnnnnnnnnnnnnnnnnnnnnnnnnnnnnnnnnnnnnnnnnnnnnnnnnnnnnnnnnnnnnnnnnnnnnnnnnnnnnnnnnnnnnnnnnnnnnnnnnnnnnnnnnnnnnnnnnnnnnnnnnnnnnnnnnnnnnnnnnnnnnnnnnnnnnnnnnnnnnnnnnnnnnnnnnnnnnnnnnnnnnnnnnnnnnnnnnnnnnnnnnnnnnnnnnnnnnnnnnnnnnnnnnnnnnnnnnnnnnnnnnnnnnnnnnnnnnnnnnnnnnnnnnnnnnnnnnnnnnnnnnnnnnnnnnnnnnnnnnnnnnnnnnnnnnnnnnnnnnnnnnnnnnnnnnnnnnnnnnnnnnnnnnnnnnnnnnnnnnnnnnnnnnnnnnnnnnnnnnnnnnnnnnnnnnnnnnnnnnnnnnnnnnnnnnnnnnnnnnnnnnnnnnnnnnnnnnnnnnnnnnnnnnnnnnnnnnnnnnnnnnnnnnnnnnnnnnnnnnnnnnnnnnnnnnnnnnnnnnnnnnnnnnnnnnnnnnnnnnnnnnnnnnnnnnnnnnnnnnnnnnnnnnnnnnnnnnnnnnnnnnnnnnnnnnnnnnnnnnnnnnnnnnnnnnnnnnnnnnnnnnnnnnnnnnnnnnnnnnnnnnnnnnnnnnnnnnnnnnnnnnnnnnnnnnnnnnnnnnnnnnnnnnnnnnnnnnnnnnnnnnnnnnnnnnnnnnnnnnnnnnnnnnnnnnnnnnnnnnnnnnnnnnnnnnnnnnnnnnnnnnnnnnnnnnnnnnnnnnnnnnnnnnnnnnnnnnnnnnnnnnnnnnnnnnnnnnnnnnnnnnnnnnnnnnnnnnnnnnnnnnnnnnnnnnnnnnnnnnnnnnnnnnnnnnnnnnnnnnnnnnnnnnnnnnnnnnnnnnnnnnnnnnnnnnnnnnnnnnnnnnnnnnnnnnnnnnnnnnnnnnnnnnnnnnnnnnnnnnnnnnnnnnnnnnnnnnnnnnnnnnnnnnnnnnnnnnnnnnnnnnnnnnnnnnnnnnnnnnnnnnnnnnnnnnnnnnnnnnnnnnnnnnnnnnnnnnnnnnnnnnnnnnnnnnnnnnnnnnnnnnnnnnnnnnnnnnnnnnnnnnnnnnnnnnnnnnnnnnnnnnnnnnnnnnnnnnnnnnnnnnnnnnnnnnnnnnnnnnnnnnnnnnnnnnnnnnnnnnnnnnnnnnnnnnnnnnnnnnnnnnnnnnnnnnnnnnnnnnnnnnnnnnnnnnnnnnnnnnnnnnnnnnnnnnnnnnnnnnnnnnnnnnnnnnnnnnnnnnnnnnnnnnnnnnnnnnnnnnnnnnnnnnnnnnnnnnnnnnnnnnnnnnnnnnnnnnnnnnnnnnnnnnnnnnnnnnnnnnnnnnnnnnnnnnnnnnnnnnnnnnnnnnnnnnnnnnnnnnnnnnnnnnnnnnnnnnnnnnnnnnnnnnnnnnnnnnnnnnnnnnnnnnnnnnnnnnnnnnnnnnnnnnnnnnnnnnnnnnnnnnnnnnnnnnnnnnnnnnnnnnnnnnnnnnnnnnnnnnnnnnnnnnnnnnnnnnnnnnnnnnnnnnnnnnnnnnnnnnnnnnnnnnnnnnnnnnnnnnnnnnnnnnnnnnnnnnnnnnnnnnnnnnnnnnnnnnnnnnnnnnnnnnnnnnnnnnnnnnnnnnnnnnnnnnnnnnnnnnnnnnnnnnnnnnnnnnnnnnnnnnnnnnnnnnnnnnnnnnnnnnnnnnnnnnnnnnnnnnnnnnnnnnnnnnnnnnnnnnnnnnnnnnnnnnnnnnnnnnnnnnnnnnnnnnnnnnnnnnnnnnnnnnnnnnnnnnnnnnnnnnnnnnnnnnnnnnnnnnnnnnnnnnnnnnnnnnnnnnnnnnnnnnnnnnnnnnnnnnnnnnnnnnnnnnnnnnnnnnnnnnnnnnnnnnnnnnnnnnnnnnnnnnnnnnnnnnnnnnnnnnnnnnnnnnnnnnnnnnnnnnnnnnnnnnnnnnnnnnnnnnnnnnnnnnnnnnnnnnnnnnnnnnnnnnnnnnnnnnnnnnnnnnnnnnnnnnnnnnnnnnnnnnnnnnnnnnnnnnnnnnnnnnnnnnnnnnnnnnnnnnnnnnnnnnnnnnnnnnnnnnnnnnnnnnnnnnnnnnnnnnnnnnnnnnnnnnnnnnnnnnnnnnnnnnnnnnnnnnnnnnnnnnnnnnnnnnnnnnnnnnnnnnnnnnnnnnnnnnnnnnnnnnnnnnnnnnnnnnnnnnnnnnnnnnnnnnnnnnnnnnnnnnnnnnnnnnnnnnnnnnnnnnnncaaatcaataaatgtaatccagcatataaacagaaccaaagacaaaaaccacatgattatctcaatagatgcagaaaagtcctttgacaaaattcaacagcccttcatgctaaagactctcaataaattaggtattgatgggacctatctcaaaataataagagctatctatcacaaacccacagccaatatcatattgaacgggcaaaaactggaagcattccctttgaaaactggcacaagacagggatgccctctctcaccactcctattcaacatagtgttggaagttctggccagggcaattaggcaggagaaggaaataaagggtattcaattaggaaaagaggaagtcaaattgtccctgtttgcagatgacatgattgtatatctagaaaaccccattgtctcagcccaaaatctccttaagctgataagcaaattcagcaaggtctcaggatacaaaatcaatgtacagaaatcacaagcattcttatacaccaataacagacagagagccaaatcatgagtaaactcccattcacaattgcttcaaagagaataaaatacctaggaatccaccttacaagggacgtgaaggacctcttcaaggagaactacaaaccactgctcagtgaaattaaagaggatacaaacaaatggaagaacattccatgctcatggataggaagaatcaatactgtgaaaatggccatactgcccaaggtaatttatagattcaatgccatccccatcaagctaccaatgactttcttcacagaattggaaaaaactactttaaagttcatatagaaccaaaaaagagcctgcattgccaagtcaatcctaagccaaaagaacaaagctggaggcatcacgctacctgacttcaaattatactacaaggctacagtaaccaaaacagcatggtactggtaccaaaacagagatatagatcaatggaacagaacagagccctcagaaataactccgcgtatctacaactatctgatctttgacaaacctgacaaaaacaagcaatggggaaaggattccctatttaataaatggtgctgggaaaattggctagcaatatgtagaaagctgaaactggatcccttccttacaccttatacaaaaatcaattcaagatggattaaagacttaaacgttagacctaaaaccataaaaaccctagaagaaaacctaggcattaccattcaggacataggcatgggcaaggacttcatgtctaaaacaccaaaagcaatggcaacaaaagccaaaattgacaaatgggatctaattaaactaaagagcttctgcacagcaaaagaaactaccatcagagtgaacaggcaacccacaaaatgggagaaaattttcacaacctactcatctgacaaagggctaatatccagaatctacaatgaactcaaacaaatttacaagaaaaaaacaaacaaccccatcaaaaagtgggcgaaggatatgaacagacacttctcaaaagaagacatttatgcagccaaaaaacacatgaaaaaatgctcaccatcactggccatcagagaaatgcaaatcaaaaccacaatgagatatcatctcacaccagttagaatggcaatcattaaaaagtcaggaaacaacaggtgctggagaggatgtggagaaataggaatacttttacactgttggtgggactgtaaactagttcaaccattgtggaagtcagtgtggcgattcctcagggatctagaactagaaataccatttgacccagccatcccattactgggtatatacccaaaggactataaatcatgctgctataaagacacatgcacatgtatgtttattgcggcactattcacaatagcaaagacttggaaccaacccaaatgtacaacaatgatagactggattaagaaaatgtggcacatatacaccatggaatactatgcagccataaaaaaggatgagttcatgtcctttgtagggacatggatgaaattggaaatcatcattctcagtaaactatcgcaagaacaaaaaaccaaacaccgcatgttctcactcataggtgggaattgaacaatgggaacacatggacacaggacggggaacatcacactctggggactgttgtggggtgggggtaggggggagggatagcattgggagatatacctaatgctggatgacgagttagtgggtgcagcgcaccagcatgtcacatgtatacatatgtaacttacctgcacattgtgcacatgtacgctaaaacttaaagtataataataaaaataaataaataaataaatacagtgaaaaaaaaagaaaaagaaggtccacatctatcaccacagtatgaggtttaaggatttagaaagcacttttacctaaatatgcctttaataactacatcaggtataacacgaggatgctgctaaaagaatggaagagtaagatagagaggcatgaaatgatgaagactttgatggggttaggactaaagagaataattttaaaaactgaacaattggcccaggtgtggtggctcatgactgtgatcttagcactttgagggctaaggcgggaggatcgcttgagttcaggagttcgagaccagcctgggcaacatggtgaaaccttatctctacaaaaaaaaaaaaaagacaaaaattagctcggcatggtggtgtgtgcctgtggtcccaggtgctctggagactgaggtagggggatcacctgagcctggggaggtgaaggctgcagtgaccagtgattgtaccgctacactccagcctgggcgacagtgagaccctgtatagatcagttaatagatagatagaaagaaagaattcattgttaacagcatatagtatttgaaagcaagtgctgtattaagagaataaaaagaagcattggtaattgaaggtaaattgatgcctttgtaacaataacttggcagttctgcaaagctaaatgttttttatagccagtcatgagtagactgcaaaatttcgagagttcagtcttggcaatctgcaaatgaatctgcatgacatttgatttcaaacaatctttcctttgaagctaccaggagtttctttcaagcatacttccagccattggtgctcccatcctccttgactcaaataggcacaaatatgaccattcatttttcctttactttccccagaaatgtgattgttttcactgctcttttactgttttcctcttaagataaatctagtaatgatttcataagatgaccataatgcagaatgttttcctcaatatctgccttagtgtaatgtaattctgatgcagaatgatggcaaagttttaattagcaacatttaagctataagaaataaccaattgaccttggcaattattccatttatttgttcaacaaatattatattaagcacttattatgtgctacaagttttgctacatggtggagatgattagcaagacacagtccttatcatctaaggacttgcagtcgagtgaagtgacaaataggcgccctaaaatataataggtattcttctagaaatcagaattcagtgaagacccaaaagaagtagtggtcaggtctaaggtagggatgttgagaatggagaataatagagcaagctggaaaggattcatagaaaaggcaatattgaactgaatcctttaaaaaaaaaagagagagacggggaaagaaaggcaagaaataccattaataaagtagagtctttgtaggctttttcaatgtaaaagagatctgaagaggtcagagaggaccctgatgagactgccttaaatgacttgctgaaaagttcgacctctaacctgtgatgggcattaagaagggtggccatatgaccaaattgacattctggaaagcaagatgtgtaaaaggcccgttagaagattattataccggtccagaagagagatgataatgaccaaaccaagacaatgaagaggagaagtcaaatgtgagattttatgattgcaaaatctgtaggatatggtgaatgctggaagggtatagtgaactactgagttcctctcagtgagagggcatctctgggtacagccaggttggggagaaatgaattttcttggccatgtagatcaggagcttaggatgagtctgggctagagacaatgctttggagcttggcagcctctggtagtggttgaagctatgggaatgggtgagattgcccaggaaggcttgtagggtaagaaggaaatgggctgaaggcagagctgtgaaggtcacaaatacgtaaggggtatgcaaggggagaggaatggcaggaacaggctgtcagttgtctagcaaatgaattgtatgtgttgggtggaggggtagatgtgagtgaaataatgcagattgccactgttgataggactaacaaagctccagttccaccataccaccaaggtaccagtgagtattttatgggagaaaaactgaaattaccccattcagtaggggaggtaattttcaaggcttttaatttcctgctaagttgctaaatcacaagagattgttttaaaggatactcttccctctttccttatttggaagaaattctgtaggcagaaagttattctcagagccctgggctgtgagaacctcctttaaccattcatcacaacagctctgagtaaatgagatatatttttatggccaaggagtccaaagagccactgactgggtaacaattaattaagctagtaactgacctcctttatctctgagtggcctctattccaaccctttttatttagagacctgaaatgcttcatactattggatggcacattctataactcttactggggtctcctcctggaagtggccatgctgaactggacacatctgagtaatccatggaaagttccatgggttctcctttttgcatgggtcctattttctgggataggtatatccataccttcctaaccaacaggggacggggtagaaccagggctgtgggaactccctaagtgtcaaatggaattttcaagagattaccctaatctttttccaattgttttatcaaggtgtctgtactaggataaggaattcctagtctctgttcctaaactttgttccaaatggttacgtggttgcagttctccgggaattgacctttagaaggaagacactaaaacatcagaatgtgagagaaatgcactgttactcctccattattttgtctcaatcccatagttccaaggaaggagctttattcctaggaggaaactttattcttacacatttaggcatccagctttgtctgctaagtcctccttccccctgaccacagaagacttcatggtaaatcaagcccactgctctcacaagcttttcttaacttggtctggttaaaacatagcttcatgcaaatagtatcaacattgcttttagcttagcagggctttccattggggccagtcataatgacagttgtatgacagtaaaaaaccaatgccatagcagtttctaaacagtagtacttgttgagaggagatgtttttcctctatcaagaactttcctctggggcctgtttatatgtctgtgcacatgcatgcaacgggtgatagaaaagaaacaacttttcatgtgggatagtgttacttctgagaggaggaattttgccaattaaatgtttgtagggattcattttagagtttctatcctttgcccaagtatgtgttttctgcttaataggaaatgagccttgtttaatttagtaaaacagaacatcatttctttaggaaagtgagggatccttttccctttgaacttaagtgttacacattggaacatcagaccagttgtttaaaatacttgagtaccataacacctgtccttctgttacaggtgcaacaacgagagtgagtggtcccagatccacgagaacatcatccgaaagtccagtgccaagtactctgcccccagcgccagccatggtgagatacttctctgactagaacattttgtgttacatttgtagttgctactcatacagcacttaggttggttggtgcagattggctgctgtattccctacagatatttattctcctgccgaggcatttcctactcattctttttgtaataatttgaggccttccctaatatctgctgaccaaaatacattttgtgttttttctatgatgagttccatatgtgttgataggtaacttgagttccaattcaaatccagagtgagcaaaaatgttgcagggtttgttacattgtgaagtctatgtttgcctaaacaaagattatactcagccaaataaatacctctatctctatatagctagatatctatatagatatagacatcacacacttctctttctatttctgaaagactgaccataatgagaatcagtgattagtctgccagtatcggtcattctgaaactagaatggaaaatctttatttcaaagaagcttcatcttagctcaacttctccttttccttttcccttcctttctgtaaaaactctgtttaaataatttctatataatctcagtgcagttctacatattatattgttttctaagttcattaatgcttgattaaattagaagcattatttaaaagcctatatgcctttatagacccttgcagatagctatctaatttacgcagaaccaggttactcctgacagtttttacctctaaatcattttataacctcttttacataatcttctttgttttaactttcatagacctgttggaaattataagttgtccttaaatgacagtgtaaagtcactgagaggcaagcagtttctaaagagtagtacatgttgtagaaaactttgttttttctctgttggggtgagcagatactcaactaggaggatccttagaggagattcacaccagaggctgccaagattgagaccttcagttgtaacaacttgattcctctaaaaccctagtggggttttgggggatatctcagagcctctcactatttttaaatgacagtattcccttatacatgtgcctggatgccaagtagctccatgcagtgtgctaaatctaggctaaagcaagagacaaataaaattttgttttaaaaatataggaaagttactagcaatttgggaaactactattcacatcaatatttgtcatgttctttggtttatttacttatctgatttataaagaggtgcccttgactacacgttcgtgggacataatgtgattaaaacatatagagaatattttaaaagagagatgatagtactaattcatgaaagagcaacttctaccattgcttcaccaggttaagatgatgagttttgtcttgctccccagagcgagcagggactgtgccatattctgtgtctgatttttgtctagaactcacagacacttgccatttaaacagtgttagaaagatctcactgtggggcaccacagacttcagagagcctcagttaggatggctgtagtgagaggtggtctctgtgtagttgtggaaaagtcagtaggaggaacaggctgctgctttttgaagtatgttagaagctagttgagaccttggaaaacctgtttcaaccccctcgttaaataaatgaggaaactgaaactcagcaaaatgacttagtggctgaacaaggatagaacccaggtctccagactccaggcctttggcctttctactcagttgccaagcttctgagcatgagttttctactgctggactctggggtctttgtgtcagagaattttatagattgctcaaggaatatttcaggtctttattagtctgcttaattaaagatacatctttattaaaaattagtttactttgctataaacttttacccatctttgttaaatattgtggacagttcattgccttgcagttctgtttcagaagtcattagtgcttttccttcaagtcacataatttaaaaatgcagaagcaattgctacattgggtttgagtgctgagagtaaatgtatcatccagcagcaactcttctatgtgaactttaatagatgtggctcttcatttccattgttggccttggatatgtagctacaaactgaacttttaacagttccagtagtagcatgaagagcattaaggacaagtgaagataaagcagttgacacacaagttttctgtttattttaaaatgactgttaactacaatttatttccatatcttgggctgacattaatttatataattaatcctcatccagcatttccacaaggaggggtgggggaggtagggcacaagaacagagtcaagttggtaccctgcaatattttacacaggtgttgatttgtccagttactttttttatgggtcagtctttaatccaataagaggttcagtaagaaaatggttttcttgtgtcaggtaatcagtgagaccagattaacagagaaattgtatagactttgttattttctttcttttttttaatttttttttattattatactttaagttctagggtacatgtgcacaacctgcaggtttgttacatatgtatacatgtgccatgttggtgtgctgcacccattaactcatcatttacattaggtatatctcctcatgctatccctcccccaaccccacagcaggccccggtgtgtgatgttccccttcctgtgtccaagtattctcactgttcaatttcccacctatgagtgagaacatgcagtgtttggttttttgtccttgcgatagtttgctgagaatgatggtttccagcttcatccatgtccctacaaaggacatgaactcatccttttttatggctgcatagtattccatggtatatatgtgccatattttcttaatccaatctatcattgatggacacttgggttggttccaagtctttgctattgtgaatagtgccacaataaacatacgtgtgcatgtgtctttatagaagcatgatttataatcctttgggtatgtacccagtaatgggatggctgggttgatttgagggccccattgagatgatagtcaggtagaacatcaagtgttgccaagggactgggtgttgcatactgggtgagcgagtgggtcactttactgaactattcatgaaggctctcttgtgctcagaatcatgccttagcattatttggtatgtgcttcagtcacccagggtttcagaactaggaaggaaacccagaagttccaagatctcaactctacaaaaggacatacagcttttatagcctccattggtgatttctttcattctttgcatgccttttcatttgatctcttgcataaacttgaaggctttctcttatttgttatgtttagaagtagagagcagctcttcaggatccctttgggtagctcaaaagctaactgtgacactatcagcacctttagtgaacatcttcatgagtttcactttgcttctgtacaccattttggttgatcagaaaatgcaaagacaaaaggcagtcagtgagtacttaaacccttgccaatgcagaatggttagagtacacccactgttttttttttttttttttgcttttgccttccaaccacaaccccctcaaattatggagactttcatccccagctatttgcttcatgttgggctgtctcctaagtcagtggatttctgtttacccagaggatatgatttgatagctacgtaaagacaacaaagatgaataagttagggttatgaggtgagggcagatatatcccaagctgttctctacagagattattgtggttttggttctggctcccaggctttcaggttcataaactaattgcggtttagtccaccagtgattaggcttaagataattactttagaggggttgaaatcttaaacactgattatctaaccagaatgccaactggaatactgtatgtttgccttttcagggcactgtgatcctggtgttaatgacacttgagataccatgtttgtaatcccaaagtttcttggaaagcatgagtttagcagaagcaacgagataattatgaggttctgtccaggctctagtagaaccgtatttcctcccttggcccagctctgagagtacaaattcctggctactgacatacttttcttgccaaataaaatatctgtaactcttctatctgacttctctctttatctacttctccattccctcctccctccccattcctagaccattcttattttacaattctgcttgttactatctccattccagctactactcttctaattgtattcattatcataacaccttattccctcatttctataattgttcagctgcatttaactcccaagcttatagaccagtgaggacgcctcctgtcaacccatagatcaacacctaaattcttcatcctgttaacagctaaacccattcacagttatagaggtaacacttcctaattccatacaggcttgactgttacagccttctagccagtagctgcagcggggaccctcaggagggtggtgtggagggggaaatttcaggagattctaactttgtgcacaactccaagggtgtaagtagtgagccagaaggcagctcacctgaggggatattacaaatactcccaagttttgattaaagatcatgtggaggatctgaaatcctcatggagtcaaggcttagttagtcccacaaaagcgccctcttttctttgcagaatgtgatgtctcctctgttgcaagccagtgcaagattgaactagaaagttacttcccacactttggcatactcctagcataaaacacagcacatcttagcttgctcatttctcatatttgggatggcctgactgaaggtcttttttggtcatgtttgtttctagtctttagatttctctaggttcctaaatatacaacttatgtagttgaaccctctcattcaatattcacaagggccagctggaccctagttggacgctggggaacagagggaaagacaactcaatctcccagacctcagtctatgtttaatagactaattctctgggttattggggtcactttgacttaaatttctttagctttccaaaatgtttcttcaaaataacttatactgtctgcataaaagtttttctcaagaattttgctgaactttgcacattttcttctggaaaatgtgactgtgtcttttcaagtactatataacagggtagaactgtggttctaagaaaatgcttttgtttttgcaggtcttatcatttctctgcagcttcttcgtggagacatggaacagattcggagagaaaatcccatgatatttaataggggattggcaattacaagaaaattgggatttcctgatgtcattatgccaggtatgcagaactgcttggggctgggaaggaagatgggttaggatggaatctggtgctcccctcctgagcaggtggtgaactgtgctatggagaagacctgcagctattaaaatctcccacatcccaagtcaggctgcttactgcagtctgcagtcaatggccctttggctcttataggcatttgttcttttccagaagcccctacattacattcaccagtgcaacatgacaatccagcagataggctttgttgtcttccatgaagtagaagtgatggtagaagtgaatatggaaccttcatggagagtttttatactctactatcctatcacatttcttagaatataattgtctcacaagaacttactgcttaaggggaagaatatatcaaaatatatgcctgtagtatcagtgaatcccatatgtgtaggaatagcagatacatttccattttcatgtatcagaaaaatagatcaggcaaatagtataaattagacattgtgaatataccactacctggccagcttctcaggaattgtatcacccatttcatctaatgccccgtggagagccagggcagaaattgggaatgcattgaccctcaactgtggtcccagtaggtcagtatcaggttcttgttttctaattaggcagacatgggtagggctggaaaagtggatccaaatgggatatcagagccaagggggctatcaggagtgaagaaagggtagaggcatggttcagatggatgttaggtgtcctgataagcagagaagatgcaaataaggaaaaggagattagaatgggtaaatgtctggttatctggatagattctaggaggagtggacctaccctctcagttgagtttttttgttgttttgagacagtcttactctgttgcccacgctggagtgcagtggtgccatcttggctcactgcaaactccacccactaggtgcaagcaattctcttgcctcagcctcccgagtagctgcgactacacgtgtacatcaccacacctggctaatttttgtaatttttgtagagacggtttcaccatgttggccagactggtctcgaactcctgacctcaagtgatccagtactggcatactggtcttgaactcctgacctcagcctcccaaagtgctgggattacaggcttgagccactgcgcctggcctcagttgagttttaatgctttgctaaaagcttatttgcttttgttgtaaagggccaggccagaccaggctagactgaactgattgtgatcactttaaatatcacttatttggagttcttcatggtggttcactgaattctcttgttggaagcatttgccagcacatacacaaagagttgggtagcttgggcatagagaaggcctatgtggtgggttccagctgccttccaactttccaggctatgcccagatttattttctgtcaccttcattctctctccatagacactgtaaatgcagagcaagctgctacacacagccttcgtcttctactcatacacacaggagagtcttttggatgggaaatgtaggctagtagatcagttatgtttttctctaaatgctagggagacttcatgcttatgaaagctgttgtaggggtaatgactgccacaggacacttctaccatcctgtcatgacacctttcttagctctttctgggctggtaattaggaaaagagcccaagcatagtcaggcttcttgactatgaaaaaaaaaaaaagttaccaaaattgaaaaaagaataaatagttaccaaaattgacctggtgatcttttaaaaattaggtatctaggcttatgtggtggagtatattccaagggatatacttaaagtccttcctttctcttgagaacttttctgagatttggatactaccttcgtgatagtcttcacatacttctgggattaaaaccaagtgatcagagactagaaaggaacaagcttcagtcaaaaatgtatttaagcaaaatttgattttaagttacattgtcaaaacctcatctgtggaaagaaatcttttttaggatactctgcatctcttcatatcattggcacacagctagacatgactctggaaatatgtaatttcaagcattggtgaggcaagctgaggttaagggggttttccctcctccgggcagctaagggatcatcatatgattttccccacaaggcagagatactgggcagtcctggcaggcccagggtggggctgtgagcctgcctttgaagtactgagtgctgtagccgaaagtaaggactggttcataggcagagcagtccttttgcataatctgccccctcttccacccattctcttcctgagaaaagagcttttgcacaggtggccactcccagggttgtgggctgttagcaacttgcatttcccccttaatatgccccaatatactgtcaagagtaggtttgcagtccctgggcaaagtgataggactgtacctgcaggtcctattggatcaacaggaaaagtgtgcaggagtgttttacattgtggtcagcctgtcttgggaaacagtgactgtgttaagaagtccttaggagtctttttcaaaccctgggcacatctctacctgcagctagtccacccatcatctgtgagagtgttttacttgaattgtagcagtccctcagctctcacagtgctggtgtgaccaagttacaagaaattgcaacttcatcttcttgacccatgaacacgtggagatataagaaggaaggaaatcatgtcagtaactgtgaccatgatagcatgataagtctgagaaattaaatggaaaaattagaagtattcataaactgtgatccttattttaaaactatccagcatttggcagaaactatcaaacactcatttggaaaggtttttttttttggtcaggatggcccagataggtccttgtcaaagcatactggcagagctgtaagggagagttcagacaggctctagccacaccagtagctaacatatgatttctaaaaagatctttttgacattctaccattgctttccatgagagtgtacatacatatcacagggatgatgtgagcatgagatattctgctctgccataactgaggccatgactacacagccattcagttctgctcatgacccatgataatgagcaagaggcaacagtgatactgctggtgttctgggagccaaaccaggaagtaccatcttagattatagaagaacaaatagatatgagaaatttagccattttttaaaaaactgaacatgtaaccttttgttagttgatcaccatatttcagtggatactttctctttccttccaaactcattttattaaagtacaaaagctaataataactctatggcacacttttagtccttttcttgattttttttaagaagatgggcaggcacgacaaacaggccaggtgttccaggtaaacaaatggatgttaacattgttttctgtaactcctgtgtcagaattagctataataaaactttaaagaaaaccgttagccaaaagagtataacctgaaaggaatgatttaaaacctctaggtcaggccaggcacagtggctcacacctgtaatcccagcactttgggaggccaaggcaggcagatcacttgaggtcaggaattcaagaccaacctggccaacatggtgaaaccccatctctactaaaaatacgaaaattagccgggggtcgtggtgggcgcctgtaatcccagctactcaggagtctgaggcaggagaatcgcttgaacctgggaggcggaggttgcagtgagccaagatggcgccactgcactccagcctggatgacagcgagaccccatctcaaataaaaaattaaaataaaataaaacctcttgctcggtcaggcacagtggctcacgcctataatcctagcactttgggaggccgaggcaggtggatcacctgaggccagacgttcaagaccagcctggccaatatggtgagaccccatctctaaaaaaaatgcaaaaattagccgggcatggtggcgttcacctgtagtctcagatattcaggaggctgaggcatgagaattgcttaaactcgggaggtaaaagttgcagtgagccaagatcataccactgcactccagcctgtgtgacagagcagaatctgtctcaaaaccaaaaccaaaccaaaacaaaaaacctcttgctcaagaagggaccgtacccttcttcagaccatgtctaagccagcagagatgtgctaccacttgccatggctctctttctttgctttcctggaaagtctgtaccctgtagtcagtggaaataaagggctttgtcgtggttttttgggaagtacaatgttttaacctattttctaagacttgaatttctaaggttatcattgattgtaggtgatatgagccaaattacatattaaatggttttctgtcttgtcataagaagtccatctatgatttattatgttgttctaatagatgactaagtttttttcctaaagcagtggttgccgaacctcagtgtgcctcagaatcacctgcaaggcccataaaacacagatttctgggcccaccccaagagtttctaacttagtaggactgtggtgggacctggcaatttgcatctctcacaagctctcaagtgatggtgatgctgctggtctggaacctcctttgagaaccatgtcatagagagtactctgcttatggatgtttttctccttcttgattccctttactcaattactgctcccctttggacatatctattagaaggcagctatataggcatagcatccttttagaggaccctctgactcttccccttgtgctcagaaacacactctgtccttttctttgactcctgacaaaaatgtgcatgtttcatcactgaccttcaagtgatgtttctttcttttcgtgtttgtcttaattgttcttgtttttctctgtgctgtcccttcattttcgcccctttctttctgacgcagagatgaagatagttgggtgtaagttctgtcttttgtgtgctctgtctgcttattgcctgctttgttctcatcttcatttgtttcatggaatgttgcaatactggggtggggtatcatgtacatattaataatcctcatcagcctcaccttcttgggtaactgacaagacataaaaagaaaagctaccagcccatcctataacactgtgtattacttttgagtattcactaagatctgaagaaactggagacatattggaatgtctagaaaatcttaacaagcttaaggtgtatagatacaggaaactatttttgtatgagactgatcagttgcattcattgaaaagaaaaggaatcgtgcttactccaagccaaaagaatcagaaaggtggaaagcttctctttttggctttgtgggacatacttcacatgaaaaggcaaaccaacagagatatggtttttggaagaaagctttcctcaaggggagcaatgacattatttaccacaagtgggttcatagcgctggtcaatctgagtgtcaaatgaggctatggcagtgtatctaagggatggtttaagaataatcacatctagtctcaaaagaggttggaagatcatcacatccctgactcaagaaaggacaaactatctatagtgatgtcacactatgcccatacctctcatcctgttagagcaaagagcatcactgactttgttgcaatggaaaccagaagtgtgacaccaaagacatggtaagaagaagaaagaatccttctttcctgggtactctaaagaagtcctctcaagagcctttttttttcttttggtctcttcctcaagtaaataagaactactccattggttgcatacctaaaaccatccaagttgaatggtagctaacatctctacatttccatgtatgctgttaggagacatccttctattcttccaacacataggcttggcatcatcccaattgtactgaaagaaagtcagttctcatcttacatgatcttaaggaagagaaagcacatctgtagaaacccctcctaatcctatctagaagtagacaaggtataaataatatagtattaaatattattgggcagggtgcggtggctcacgtgtgtaatcccagcactttgggaggccaaggcaggcagatcacctgaggtcaggagttccagaccagcctggccaacatggtgaaaccccatctctactaaaaatacaaaaattagctcggcatggtggcaggagcctttaatcccagctactcaggaggctgaggctggagaatcgcttgaacccggtaggtggaggttgcagtgagccgagattgtgccgctgtactccagccttggcaacagagcaagactccatctcaaaaaaaaaaaaaaatatatatatatatatatgtgtgtgtgtgtgtgtgtgtgtatatatatatatatatatatataaaatacttgaacccagagcctcctaatatgaagtgtgagtaatttatacagaaggaatgtgaatataataaagaactcatatcagattttgactggccaaacttgtttgggccttcgcacattatttctgctgggatggaattccacatgggctagcactaatgaaacatttggccccaaattccaagtagtactggagtatctggcaagagattctcttgctaacaaatgttctggtgcctgagctggacttcagaggttgggagacctctgagactactctcagaagaaatctgcaaacacatcatgaactgtttctccagagtcactaggatacaggtcttcagagggtcagacctgtcactggtctgtgacagtgctccctatctatcccgttaagatttctggtggctgaacagcactgtttacttttaagatcgctcactccataagcacctctgagtattccaggccaatccctgtcataataacatagccccaggttcattaccttgctttctcccagtagctgtttgtctaggtgcacaggaatctgtatttttgatgtgcagttgcagtgtagtgtggctgttcttcacacataaacgttcccagccaggtatcagtaaactatagcctatgggccaaatccagccaacagcctatttttgtacttcttgccagtgaagaatgtttttcttttacattttaaaagtgttgtaaaaacaaagaacaactgccagagacatatgtggctgacaaaacctaaaatatttactatttagtcttttacagaaaaggtttgtcaactccaataaacctaagtgcccagttttctgagtgcagctgtaccaacagatcctgtgagactgtaaaagggacagatactttattccgagaccctcttataaaaaaaaactcaaatcgttccacttcattcaagaaattctgttggatgtcacccaggcactaagcactcaatgtaaggcattactgatgctgtaagatgccctgccaaccttaggaagcagagggcacttaacaaagggagtcagggctgcccaaggtccttcctaaaggagagacccgtcatcagggctaccctcagaaatacctactcctacttcttgtagaaaagactcaccctctcagcacatctgcatgctgcctaagagctgcccagtcccctactcctacccaaactccatcaacgtcctcccagcagacctccatattctggtttcctagtgttaaataatgaagaacatcagaatcacttggtgattttttaaaaaatatatgtacacaagacccactggaatttcaaggtgtgagtgctagaaatctgttttcaacaagttccccaggtggttcgaatacaatcatccaggcactggtatgcaaactaacctccaaaaccactgctccagctttctctttctcatcttcattgtaatgtgcctgccctcatgcctctctctcctggtaatatttcctggcagttggtgccagagtttacaggaggctcttggaagcagagccttaacccagaggcatgatcccactggtaggttttgtgaacacgtaacatgcaatagggacagctgaagagtgggggaaccatggaaggctatctataaggcaggcaggcaggcctgggtcattagatccctggagcttttcacatttgcttctgcttatgctttctcctagttccaagagaattcgtggagagcttgattgaagtgatcccccagagagattttgacaagaagcctctccctcccagcaacattcattttcacaaattgccactcttgaaattgaaaccataatcgcataattgcaacccataagcccaatagcctaatacctaacctgactgagaatagttctagtctagctaggcaggtctgttctccaaataaagagcagctaaagacctgatgaaaataaactgcttcagtctgtaactcagagggtacaattacttgtattgataaattttctcagctagatgatcaccaaaggcattctgttttttaaaaaaatgaaaactacaggaatatgtagcttaatccttccgttttgaaactggcattttaccttaaaatgctctgcccagaaactgtgagcatatctctgtatagtcaacacagatcaaattctgtcattaacaatctctaagacactaattttatttatctgtttatttatttttaaaagacaatgtctcactctgtcacccaggctgaagtacactggcatgatcatagctcactgcagcctcaaactccggggctcaagcgatcctccctcctcagcctcctgagtagctaggactacaggtgtacactaccatgtttagctaattttaaaaaatttgttttgaagagcctcactatattgcccaggctagtttggactcttagcctcaaacaatgtgctcacttcagcctccttataatccatagcaggaattacaggtatgagccaccatgctcagcccctagttttatattagtattttatataatatataactaggaaaagtttgaaaatgtttcatttgaaggacatgtttattgattaacctgtgtatagagccacagaaactaaaaacgtttgtataacctagaataatattgctggtagccaacagataactgcttttaaaagcctcatagattattttcagaataacttccagagagttcaaaccagggtaatatttaaatgaagcacctattctttagattaagcattaaaattttctagactatttgactcagaaaaggataaaaattaaaattttagaataaataataaaaaaaatctagactattcaccttgtgctatatcagtctacaaatttaagtattacttaaattccataggaaaactaatgtgcaattaaaagacttttataagaagcctgtttcaattgttaaaaattccaggtataactatgatttatcccaccataatagcaataacctgactttaaaggagaaagttaaaatgaagaaaaatagcaataagccatagtgaagttctgttaagtttggattttactttcaggactgactttattcagcctttgtcctgacagtagcagactgatgaatttgagcttcctttctcattctacctgtctttcccacccaaacctaccctgtacacctgagtgctctaaataatgtaccaggagggcccaagcagcaatgtccaaaggaagcggattaagattccagactcatcagaattcaaagcagaggcacttcccaatccaagggtttgtgcagatgtggtcctccaggatatcctacatatgcaacagtggcattttggtatgattttcaaaacacattttcttcttccttcatggtaacctcaaggttgcttgtttaggaaagaagatggctttcacacattagggaaagttcttagggctcttgaggaatagttaattgcttgtcatgaacttttcttacccactttagccacagtattttgagaaccttcattatgcaaccaaataaccatgattgcaagattgcatacctgggataggaaaatgacctgaataatggaaggactagtcacgaagaccctgaaatcctcaaatatgtgccagtcctggtctattcctgtttcatgcatgagagaagctcagatgcttccattattagagaggtagtcagtgcaaaaaagagagcattgtcatttatctctgaccaaaccagaaagcccacttgctaaccaaaaacaaaccctgcttctatcattatgattccaggtggtaacatatttgaatgtactagtttttctaagaactgaagtagaaaaaattacctggtttctgaattggcatgttttgctgttgtttcattacctctcatttggtttcttcaggctgctaacacatcttcactttggtcttacccattttcctttgccattttctccctttgaagtttgttgcccccacagcgttttactatttttttttttaagtcagaagcccttctttagttcatgtgaataaaactggtcatgttaaaggtttaggaatttagagcagcctaaatacactcttatacatgaacaggcaatgctgtctcccctcaactcatcaccctaaaaaggaagatgtaacttaggtcattttagacttgaagtttgagcttctcttctccagtcttgaacaacagagttgggcaaattgggctggtcagagcacagggaagcaaaaaagcacaacaggttgttgcctcattgccttactacctatgcttctggcaagtgatctcccagtgcacttgcaaacaaaaagaagaaaaagcgacaggtagtccagtgacctctacctgtcactccagcagggaatgggatttggaacaaagcctccaggaggaaggaaaagtaatatatcctctagtcagactcagaagggatggggattacaaaaagaaagcatataaaaagtataaatctataaaagagaaacccttcttgagggaaaagaagagggattagtagttaagacataggcatgttaaaatgttattccttttgattctagaatcttccctctttgggaggcttagattacagccattctcctggaggggagaaagactgagcagtctgagcatctacaatctgaaagattctccacccttgacaaggtgtggtgaacatctttagaattcagacttagagaacacatgactaaccaacctgggtgctgctgcactgatactggtagaatgtccatcattattaaccaagcttggaatgccctgaacacccacccaagccccagaagatccaaatgctagcctagttctctgtgaaaatggggcagtatggcttctggagtcataaggatgtggcatttctttccccgcaggtgatatccgcaatgacctgtacctaaccctggagaagggggatttcgagagaggaggaaagagtgtacaaaagaatattgaagtgaccatgtatgtgctttatgcagatggagaaatcttgaaggtaaggcttgccagtcagtcatttgggttggaggataatcctataataattctctgtggactttatccagaggcccattctcttcaagcaggattaaaatcaccccatcagcctttttctctgcctttttctttcttgaagaaaactctaaagtgtgctttgataatgacttccagtattgtacagccattgcagaaatttatcctagtgtctgacctgaatccctcttgctccagtttagatttattccctctagttctatcctacatgttacctctcctgtcattccacctagcatagagctgcctacttttggtaactgttattaggtcccattctgcctttttattccttgagctaatacagaaagttatatttacactttggtcaagtgtggaacttagacaatcacttcctggtaccaagttataggacaaagaacagcagactcaggccgtggaagatttaagccaatgtagtacaagtgtcctctgttattcttcactgaaaatgaagacttcagtgctgtttttctgttgcatgtgagttttttcttcagtctagtcatggtaaagtctgcggtgaataacaaggcatcatttgcagcccactttgtagaagacaaatcggtgttgtacgaaccttgcttctgtgtgttggcagcagccctgtgagatagaacaggaatgatcattcccatttgacagaggaaaagggtaaaattagtcaaaatcatttcccaaatcaagacagaaatagaggagaatgttgaaatagtagtagaaacaacgatttgtatgtcattttaaaaacttaactcaaaaacctaagcctgttcactgtttgcatggagcatgccagtggcaggagaatggtcagctgatcacatcacccctgtgtggacagggacctactctggcttatgtggcccaaagcttcctgttgtccagacaagggcatgggcagtactgagacagcatcttcatggcaatatttgggagatgggttaagttaaatctggactaacttgtttatatctaaagaaagtcagccaggggtgacctaaaatgccagtccaatgtaggactgaggacaattagaaaacaggctgtctccactttgtaatttaattttttttctgatctggtaaaatgttacatagagttggcttttctcatgcagcttgttgtttctcttcttagtgaggatgaggagcctaccttggtgatttagatgcaccaccctgcttctctctgtttttgaggagtacatgtggttacgttcaccccaaggaaaacaaggagcattgtgactgctgatttcatataccatctatgtaactgcttccaaaagcattgaatttaaatcaaatgcattttcttatctcatagattttgcttagagcaaaaatgagacctttagacaagagaaagaaaagtgtcctagtgacacagaaatccagacattcctaccaggaagatgacatcttattttgtttctttcttccaggattgcatcagcttgggttcaggagagccaaataggagttcctaccactcctttgtcctctaccacagtaatagtcctcgctggggagaaattatcaaattgcctatccccattgaccggttccggggctcccacctgcgctttgagttcagacattgttccagtgagttagacttccccccctccacattcccttgagaatataaatataactctctcctctcttgaacagaattaagtggattcttatttgggcaagaaaatgaagagttaggaataaacagctactcagagatgggatgtcaccagaggctgttcttgggactataaaagcagtgattcaaaaccacaaagtcttgtgttggcccttcctggtgtctgacctagtgtctgaaattattatccattgtcattctcctttgagtattcctttgtaccattattaaactgcttattaaagagaccctagttcatcaagaccagcaatttagtttctttttgggtctaggtagcctatatgccttgagtatgaatggaaactcatttcagcacatttctcatcattcctgcagtcaggttgccacctagttaatgaaagaggcgaggaacaaaagagcataggtgataagcacaaggagaatttccatgaggaagcagagtggaaggcaaaaaacaactaatacttggctctgattacagcaaaggacaaaggggaaaagaaactctttggctttgcattctcaaccctgatgcgtgatgatggcaccaccctctcagatgatattcacgagctttatgtgtacaaggtatgaagcctagctgcctttcatccccaccccttacctgccctgaggccactctcacacatggttctcagttaggtggttttcactgggcaggccagaagaccaagggaagtgcactggtgggtgacagtgggacatctgtgggcaggcttctgtcttctaagtgcggtggccgtcctcccacaagtaacgccaacaggttctttgttttctacttctcacttcactggatggaaatccattaccaacccctcattgccattgtggtcttgtttagtacattcttagacctgctatttgagatcatggtactgtcaactgtcatagcatagctgccacccaaggttacttgcacatcaggtggcaaccacatgccccaccatattctgtttaaaaggcacatgagctgttctagggagtttctgaacagaaagtactcttccaagaggacctgaggcccaacgttcagccttaggaagatgagagcaagtatcagcccagaaattcctaggacctggtttttgcatgttgcatggctcaggggacatttttttctccatttttgcctacagtgtgatgagaatagcacgtttaataaccatgctctgtacctgggcctgccctgctgcaaagaggactacaatggctgccctaatattccttctagcctcatcttccagcgcagcaccaaagagtctttcttcatctccactcagctctcctctaccaaactcacccagaatggtaggtgataatgcctgcagggtggtgccctccaccctcctccattgttcactccacactactagcgcatgtgaagggagagataaattattccttcttgatgccataataatgggcttcttttcatttgaagttgaagcgatcactcagcaatagcagcctacaaggtttttcatggttttagtagctccacagtacatccagagtttacagatgagtctttggccttagactcagtctgtggtgatgcttgcagctagttctgttcctctagattccacctgtccttgactgggagagtctgggccttgcttgaccttagaatagccagggtttggccatgtgcggtggctcatgcctgtaatcccagcactttgggaggccgaggcggacagatcacttgaggtcaggagttcaagaccagcctggccaacatggtgaaacaccatctctactaaaaatacgaaaattacctggacatgatggcgcatgcctgtaatcccagctactcaggaggctgaggcaggagaatcacttgaattcgggaggcggaggttgcagtgagctgagatcatacaaccgcactccagcctgggcaacagagtgagactccgtctaaaaaaaaaaaaaagaatatccaggtttcaagggttcctcatcttttgggcttgctttctagtggacctcctagctctgctgaagtggaaagccttccccgaccggatcatggatgtactagggcggctgcggcatgtcagtggggaggaaattgttaaggtatgtcttccatataatttaaacatactgcatgaggaagaatctgggcagaagaccttactttgtcatgatttttgccaataaccgtctgagactgtttcatcagatttttgttgttgttgttgttgttgttagcttccttttcctcttttggtatgcttttattttttattttatttttaactgacaaataataattatttatctgtatgggatacaatatgatgttttaacagtgcagaatatatgttcacaaagtagaatgattgcagaatgaccacaaccttccctcagcctctggtattcctcattgcacgttctacttctatgtgttcagttttttgtattccgcatataagtgtgatcgtgtggtctttctgtgcctgacttatttcacttagcttaatgtcctccagttgtatccatgttgtctcaaatgacaagatctctcccattttaaggctgaatagcattccattgtgtttatatgccatgttttctttttttattttataatttcagcttttattttagatttagtgggtacatgtgcaggtttgttacgtagatgcattacatgatgctgaggtttgagatacaaatgatctgatcactgaggtagtaagcatagtacccagcagtttttcaacccttgtccctgtccctccccactctagtagtccccagtgtctactgttaccatttttatgtccacgagtacctaatgtttagctcccagttacaagtgagaacatgcagtatttggtttttctgttcttgctagtttctgtagaataatgagctccagctgcatccatgttgctgcaaaggacatgattttctttttttttatctgcatggtattccatggtgtacatgtaccacattgtctttttgttgttgttgttgttttgttttgtttttttgagacagagtctcactctgtcgccaggctggagtgcagtggcgcaatctcggctcactgcaacctctgcctgcccggttcaagcgattctcctgcctcaggctccagagtagctaggactacaggcgcgtgccaccacgcccagcaaatttttgtatttttaatagagatgagatttcaccatgttggccaggatggtctcgatcccttgacctcgtgatccatccgccttggcctcccaaagtgctgggattacaggcatgagccaccgcgcccgacctatgtaccacatttcctttatccagttcactgttgatgggcacctagattgattccatgtcttatgttattgtgaataataccgtgatgaacatttgagtgcatgggtctttttggtagaatgatttttttttttcttttggatatatacacagtaataagattgctgggtcaaatgttagttctaagttttttttataaatctccaaactgcttcccacaggagctaaactaatttacattcccaccaacaaggtataagagttcccttttctctgcagcttcgccagcatctgttattttttgactttttttttttttttttttttttttgagacggagtcttgccctgttgctcaggctggagtgcagtggcatgatcttggctcactgcaacctccgcctcctgggttcaagtgattctcctacctcagcctcccaagtagctggtattacaggcatgtgccaccatgcctggctaattttcatatttttagtagagacacggttttgccatgttggccaggctggtctccaactcctgacctcaagtgatctgcctgcctcagcctcccaaagtgctgggattacagaagtgagccaccacacccaggctttttgacattttaatagtcactctgactgttgtgagatagtatctcattgtggttttgatttgcagttctctgatgattagtgataatcagcatttttatatgtttattggccactttattgtatgtcttcttttgagaagtgtctgtccatgtcttctgctcactttttaatggaattgttttttgcttgttgagttgtttgagttccttatatattctggatattagtcatttgtcagatgcatagtttgcaaatattttctcccattctgtaggttgtctgtttactctgttgatagtttcttttgctaggcagaaactctttagtttaattaaagtcacgtttgtcaattgtttttgttgcaattgcttttgaggacttagtgataagtgatttcctaaggccaatgtccagaatggtgtttcctaggttttcttctaggattcttatagtttgagatcttacacttaaatcttgaatccatcttgagttcatttttgttcatagtgaaagtaggggtccagtttcattcttcagcatgaataatgtactagctgcagcatgtcagtgggaaggaaattgttaatttccacacaatgtaaatatactgcctgaggaagaatgttcttacctctaccttaactgtttctagccagctatctcagcaccattcattttttgccaattgttacactctcttttttatgtttttttttatagttattgggatacaggtggtttttggttacatggatgagttctttatttgtgaattctgaggttttggtgcacctatcacccaagcagtgtacactgtacccaatatgttgtcttttatccctcactaccttcctaatggttggttccatatccttgcagatgcgaattgtgctgccataaatatgcatgtgcgtgtatctttttcatgtaatggcttcttttcctttgggtagattcctagtagtggaattgctggattgaatggtagatctacttttagttctttaaggaatcaccatactgttttccatagtggttgtactaatttgcattcccaccagcagtataaaagtattcccttttcaccacatccacacccacttctgttgttttttgacttttcaattatggccattcttgcaggagtaaggtggtatctcattgtggttttagtttgtgtttccctgatgattaatgatggtgaacattttttcatatgtttgttggctgtttgtatatcttctttggagaaatgtctattcatgtcctttgtccactttttgatgggattatttgtggttttttgctgatttgtttgagctccttgtagattctggatactaatcatttgttgcatgcatggtttgcaaatattttctcacactgtgagggttgtctgtttactccactgatatttcttttgctgctagcaccatttattgagtatggagtcctgtccctgttgttatttttgttgattttgtcaaagaccagatggctgtaggtaggccattttattttgaggctctctgttgtgttccattggtctgtgtgtctttttttataccagtatgatgcatttttggtactgtagccttgtagtatagtttgaaatggggtgatgtgatgcctgcagctttgttctttttgccaaggcttgctttggctatttggactctttttcagttctgtattaattttagaatagtttcttctaattctgggaaaaattatgttggtagtttgataggaatagtgttgaatctatagattgctttgggcagtatggccattttaacaatatcgattcttccaacccatgagcacggaaggtttttccatttgtttgtgtcatttattatttcttttagcagtattctttctttctatctatctatctatctatctatctatctatctatctatctatttatttatttatttatttatttgagatggagtcttcctctgttgcccaggctggagtacaatggcgtgatctcggctcactgcaacctctgcctcccagattcaagtgattctcctgcctcagtctcccaagtagctgggattacaggcatgtgccaccacgcctggctaattttttttgtatttttagtagagacaaggtttcaccgtgttagtcaggctggtcttgaactcctgacctaaagtgatcctcccatctcggcctcccaaagtgctgggatttcaggcctgagccaccacgcccatcctctttcagcagtactctgtaattatgcttgtagaggtctttcaccactttggttagatgtattcctaggtattttttgtgtatggctactgtaaacgcaattgcattcttgatttggctttcagcttgaacgttgttggtgtagagaaaagctactggcttttttaacatataccacattttcttaatccattcatctgctgatcaacacctagattgtttccatatcttagctattaacaattttgcagtgaacatggaagtgcagacctctcccatgttctgaagatgtccaagacatcttcaacatactgatttcaatttctttggacatatacccagtagtgggattgctggcttatatggtaatactatttttagttttctgagaaacctctatactgttttccataatggctgtattaatttacattctcatcaacagtgcataagaattcctttttctccacatcctcaccaacacttgttatgttttatcttttggtaatagctctcccaactgggatgaggtgacatctcattgtggtttcaatttgcatttccctgatgattagtgatgatgagcattttttcatatatttgttggccatttgtgtatcttcttttgagaaatgtctacttaggtcctttttcccatctttttgattgcgttgttttcttgctagtgagttgtttgagttccttatacattttggatattagttccttatcagagatacatggtttggaaatattttctcccattccatgagttgtctgtttcctgtatcagtttttgtttttgttgcctttgctttgggggtcatactcaaggaatcatactttgggatttttttgttagctccttttttaaaaaggtatatagcatatcagtttattaacttttaaaaactatatttaagcctgatatctttctggctctactctcctgattttaagaactctaaatactgctcattaacttgtacctgctgattttgtctagtctctcacttggagtccataataccttccttccttacccctatgttaactgccttctccaagtacctttgtgacatttcctatctaatggctttagcaggctgacatcaacactgccagtccccagttgccttcatagggcttttctgggcagagtgtttccccttagctcaataaaaaccccaggcacttcctggtggtgaaagcccatcaggtgaatcctacacagtggactgaattctactgaagaaaatggaagtatttttggttatcagtaagagtaatggaatgtaggctagagattaaatctggagaaggcatcctgtccataatgaacattcttagctttgccatcacaagcgtcaaatgaattagcacaaatgcaccacctaactttgctttcacagctccattaactcaataatacacaacacagtgtttccaagtcaggaacagttttaaagtctgtgtaccactgtgtactttcatgaagttgatgtatgaattttgttttaattatgtgatcagattatcataaaaattttttaactcttcaaagcaatctaatgctagttttgaaacttaagataaattcatactcatattttccttctaagaatattgaaaatatcaaccagtaaacgaggtattaagaagtctgttgtcttttcaagggtgagcttttatattcctgagaagagaacatcctaccagcatatctagttttagcatcaataatttgtctccagctagctagaagacaatgtaaagagaatgtgatagcattttgaaatattttttacttcttattggaagatttcaagcatatgcagaagtatacagaatagtataaagaaccttagatgtatctctgacccaaccccaaagaccattaacccatggccagtcttgacccatcattattacccctatctacaccttctacctcatatttttcagaaatgaattgtaaacattgtatcttttaaactggaggaaggatagacttgatttttgaaggctgcaagtgtccatcaatatttattattctcttcctttgtttttgcatctcagaaataggcacatgttgaaacaacaacaaaaatactgccacattttttacccccattgacagccctcattgactgcattctccattcttctgtaatactaattcttagaccaaaaaatagtgtctgtaggtaaagcctaacttgccacacccttatcaaatatactctatattgttaggccacagtagagagcaagagactactgaacttttggggataccagtaagctctttttctcaaaataaatttggcatcagtatcacttagattgtttttatatcaaaattgctattctgcataggtgtcctatggtttttagggcattgccctttccttagaaatgtatcactcacccaacaggaagagcctctctaagtctttcttggggccctttgggctataagccaacacctcaagtgcacctagttatcacttagctgggtggagggtcagggtactagtacgatgatttttaagtggtattttgagatcctaagagatctttcacttttttattggaagttaaattcattgatttatggaagtttgtgcgtgtaaggtcctgagacctgagccctctgctttttatgttgttttagtttctgcaggacatcttagatacactctttgtgattttggatgataatacagagaagtacggcctgttggtttttcagtctctggtaagtcaccttcctgactctttacttttattaattattcctgtcatatatttcagaaaatttaagggaagcaatttattagagtgaatcagcacaagatatagatgtttccaatagaaaagggactaaggactgtcacccaaggaagaccaagcaaccaaccaggcagatcaaacttgaagaatccaacacaatcaagtccagaccttgactttatagtttctggatcttccatctcatcactattgcagtatgcctggcccatgaaatagtgacctccatgaggtcagaaacccagagagtaatacaagaaatcagatggctcattttttcacttacaaagtaggatataaccatcatgaaaagcagagacttacccatgctggtctctagagacctgtgcaggtccagaatctatgcagttgtttcagaactagagtctcagaaggttggttaatgaaaatggacagtgatttgaatgtttagtgcattttgcctaatatatccagtcccacagagagccatacattcaagaagagtcagatactctcatagataaggagcagaggtgagagttgcaatgagtacttgcatagtttgcccctccggctcttcttcttcctaatttgcctgtccaccagccccatttctgaaggatacagagtttcataggctgatttggctcagaggacaagctttttttcctctcttttccacgtttttgggaataccttattgtttatgccatctacacgcatattgttttgcctttccctgatctgtattgtaccacccagcattattgtgaagggagaggctcacagtaaatacaggaagagactgatgagcccgggtctgaattaggaggctggggtgttagagaaaagacaagacagaaatacagacacagaatggaaatcttacattcactacccatggggaatgctagaggacagcactgacaatttgccattatttggagaaggaagactctgtttcctgctggggatagatctgaggcctccagtgaaccctgatggcttactctccatatctcccaggtgttcatcatcaacctgctccgagacatcaagtattttcactttcgacctgtgatggacacgtatatccagaagcactttgctggagctctggcatacaataagttccatttggtatcatcattaggactcgtgtttgagtagaaatataggctttaaaaaagtttagctgcaaccagcatttaaaaagttcagctgactttttaaaaattttatatttttaattgtgataaaatacacataacacaaaattgaccatcttaaccattttctgagtgtagggttcagtgactttaagtacattcacatcattgtacaaccatcaccagaactctgtccatctccaaaactcttttcctgttacaaaactgaaatattgtaatcattaaaaataactccccattctcccctcccctatcccctggcacccaccattctattctactttctgtctctatgaatttgactactttaggtacctcatgtaagtgtaatcacaatatttgtccttttgtgagtagcttatttcactcagcataatgtcttcaaggctcatccatgttttagcatgggtcagaatttcattcctttcaaagactgaataatgttccattgtatatatttaccacttttttttttttttttttttttttttttttttttttttttggaaagggagttttgctttgtcacccaggctggagggcaggggcccaattttggctcactgaaagctttgtttcccgggttaacaccattttcctgcctaagcctcccgagtagctgggactgcagggccccaccaccacacctggttaattttttgtttttttagaaaagtcagggtttcaccatgttacccaggagggtcttgatctcctgacctaatgatccacctgccttggcctcccaaagggctgggattacaggcgggacccaccccccctggcggggttttttggttggtttttaaattttatttaaagtccaggggtccatgtccaggtttgttatataggaaaatttgggccatgggggtttgttgtttaaattttttcaccccctaggttttaaccctagcccccattagttatttttcctgagcctttcgcgcctcctaccctttaccctcaaaggcctcgggtgttttggtcccctcttnnnnnnnnnnnnnnnnnnnnnnnnnnnnnnnnnnnnnnnnnnnnnnnnnnnnnnnnnnnnnnnnnnnnnnnnnnnnnnnnnnnnnnnnnnnnnnnnnnnnnnnnnnnnnnnnnnnnnnnnnnnnnnnnnnnnnnnnnnaaggctgtggagtcactgaaactctgatactttgatgtcactttggagagtggactgttctatgtgctttatatgcgtctttctattagtatttgtgataactttgagatgtactatttcccccatattttcattgaaaagaacgtgacacaggggattaaataactcattcaaggatacaaaactagatattgataggccccagatgtgaccatggcgtatactcctgacctctgtgctttgttgccatataaatatgcagaccttctgacccagtaatctcattccattcagatgactgagtcctaaggaaataagatagatgagatagagcaggggttgtgaacagggactcctgggactgcatacttttattcagaatctactatttactggctggtgtcagatgttctgaaaacctagcaatttaagacaaaacaaaaatacacatccagtccaggtctttaggaaaacttttttttttttttttttcagatgagatattgttctgttgcccaagctggagtgcagtggcgcagtcatggctcactgcagcctttacctcctgggctcagttgatccacctgattcagcctcctgagtagctgggactacaggcacgcaccaccatgcctggctaatttttctatttttttgtagagataaggtttcgccatgttccccagacttgggtggaaactttcttgtaatcaaaaagaaatgtatgtcagagagagtgggaaaaagttattttagttgctgattaaaatgtggcaactcctatggacaaagagtgttgtttgttctcaggtgacctgaatagtccaaagctgtaatggatctatcactcctttctagctcatcagcagaatattatttcctatttgcctaattcagggctacagatgtttcaagctgcattacttttgaattaaagtggggtttctggaactgttctctttcccagggagctcatccgctgtttgaagtggtatatggactgctcagcagaactgattcgacaggaccacattcaagaagctatgcgggtaatgtactaacctctccatacataagagacccactcatgcaattatttgtgagtaatctcagtgatacaatgtgcaggacaaatgtagacatcgcagtacctggcctgctttcaggaatgactgtcttgatccacataatttctctttccttaccttgattttgccccagaaagcttttattcctgataattttaaagaaggagggagagatgatatgcacatggctcctggctatcctcccctgcctgattgttacccatagtatcagtcctttctaccactggctaaagtatagtaactccttctaagccaatgttggtggcaacgttgattgaattaggatcctctaatagtattctcttttttggtagttactaagcatagattttttgaactgttttaagtaaaaagagctgagtggatgcactgtatgtgggtttgttcagaagaagggaatcttaaaactgtggccttaggaagaacctgtggtcttccatggtcgtgaccattgtcagcatccctgcttggacaggttccctgacaaggcagccctttgtattgctgggtagctccaattgacaggggactgttctcattttgagttaactccactgtctggtaacttcttttcatgactactgttctgctgttaaaacaaacaaacaaacaaacaaaaaacagttttgctttatttctgtcctcttttaatatcacatcacctgcaacaagtactggacctgtgtttttgtccttttccacatgtttaacaggtaacagaatgttttctcaagcattatcagactgaaggggcaaaatcaaatcatagatttgcatttagtcttcctcttctttgcacattccgtaaaaatctgaggctgcaaggctcatttctgtcctctttcatacaaatgcctactgagcatctgtcctaggggctaagatgcaacgatgaataagaccagcccatcttcttgaagaacatatccgcagtatcctaaggggaggcacgaacacaagtgtagggcagggtgctgaggcatgtgaggaaagggcctcggttctcttcttctcagaaccctagcacctgtcaggtgcctaacacaatatttgagtggataaaagttgagttaaatgcaaaagattctatatgagcctgaaaaataattgcttaaggataccggagaaggcagcgcagaagttgttttctcctaaaaatcattcgtttaatcattcagtcaatgttgcttgatacctaccatgcttcagacactgttctaaccactggagattcagcaggggcccaaacaaaaatggctagggcttcatagtactttcattcaagtggggaaacacatacaatatatgtaaaacagataaatacatgtatttattctaatcaatgttgacaccaacattggcttacaaagtcagtttaaaaaacaaaacaggacagagtgagactccatcttaaaaagaaaaagagctgattctcctgcctcagcctgcggagtgcctgcaattgcaggcgcgcgctgccacgcctgactggttttcgtatttttttggtggagacggggtttcgctgtgttggccgggctggtctccagctcctaaccgcgagtgatccaccagcctcggcctcctgaggtgctgggattgcagacggagtgtggttcactcagtgctcaatggcgcccaggctggagtgcagtggcgtgatctcggctcgctacaacctccacctcccagccgcctgccttggcctcccaaagtgccgagattgcagcctctgcccggccgccaccccgtctgggcagtgaggagcgtctccgcctggccgcccatcgtctgggatgtgaggagcccctctgcctggctgcccagtctggaaagtgaggagcgtctccgcccggccgccatcccatctaggaagtgaggagcgcctcttcccggccgccatcacatctaggaagtgaggagcgtctttgcccggccgcccatcgtctgggatgtggagagcacctctgccccgccgccccgtctgggatgtgaggagcgcctctgcccggccgccaccccgtctgggaggtgaggagcgtctctgcccggccgccccatctgagaagtgaggagaccctccgcccggcagccgcccctatgagaagtgaggagcctctccgcccggcagccgccccgtctgagaagtgaggagcctctccgcccggcagccaccccgtctgggaagtgaggagcgtctccgcccggcagccaccccgtccgggagggaggtggggggggtcagccccccgccaggccagccgccccgtccgggagggaggtgggggggtcagccccccgccaggccagctgccccatccggcagggaggtgggggggtcagccccccgcccggccagccgccctgtccgggaggtgaggggcgcctctgcccggccgcccctactgggaagtgaggagcccctctgcccaaccagccgccccgtccgggagggaggtggggggttcaggccccgcccggccagccgcccagtccgggagggaggtgggggggttagccccccgcccggccagccgccccgtccgggaggtgaggggcgcctctgtccggccgcccctactgggaagtgaggagcccctctgcccagccagccgccccatccgggagggaggtgggggggtcagctccccgcccggccagccgcccggtccgggagggaggtgggcgggtcagccccccgcccggccagccgcccagtccgggagggaggtgggggggtcagccccccgcccggccagccgtcccgtccgggagggaggtgggggggggtcagccccccacccggccagccgccccgtccgggaggtgaggggcgcctctgcccggccgcccctactggaaagtgaggagcccctctgcccggccaccaccccgtctgggaggtgtgcccaacagctcattgagaacgggccaggatgacaatggcggctttgtggaatagaaaggggggaaaggtggggaaaagattgagaaatcggatggttgccgtgtctgtgtagaaagaagtagacatgggagacttttcattttgttctgtactaagaaaaattcttctgccttgggatcctgttgatctgtgaccttacccccaaccctgtgctctctgaaacgtgctgtgtccactcagagttaaatggattaagggcggtgcaagatgtgctttgttaaacagatgcttgaaggcagcatgctcattaagagtcatcaccactccctaatctcaagtacccagggacacaaatgctgcggaaggccgcagggtcctctgcctaggaaaaccagagacctttgttcacttgtttatctgctgaccttccctccactattgtcctatgaccctgccaaatccccctctgtgagaaacacccaagaatgatcaataaaaaaaaaaaaaaaaattaaaaaaaataataaaaaataaaaaacaaaacaaaacaaaacaaaacttggctggccgtggcagctcacgcctataatcctagcacttggggaggccaaggcgggcggatcacctgaggtcaggagttcaagaccagcctggccaacatgatgaaaccccatctctactgaaaatacataaattaaccgggcatggtggcatgcacctgtaatcccaactactcacgaggctgtggctcaagaattgcttgaacctgggaggcggaggttgcagtgaaccaagattgtgccgctgcactccagcctgggtgacagagcaaaactccatctcaagagaaaacaaacaaacaaacaaactcgatgagtactatgaaggaaataaacaagattatggaacagactggctggaaaggagggtttacttcagatcaaggatttgggaaagcttctctgaggaggtgatctctgagctgaagtcagtgttaacagttagggagtgagcactccagactgaggaaacagaatatttaaaagcctagatgggaaagggcttgggttttgtttttgcttttgtttttgtttttttattattgttattatacttaaagttctaggatacatgtgcacaacgtgcaggtttgttacatatgtatctatatgccatgttgatgtgctgctcccattaactcgtcatttacattaggtgtatctcctaatgctatccctcccccatcccccaaccccacaacaggctccagtgtgtgatgttccccaccctgtgtccaagtgttctcattgttcagttctcacctatgagtgagaacatgtggtgtttggttttctgtccttgcgatagtttgctcagaatgatggattccagcttcatccatatccctacaaaggacatgaactcatcctttttatggctgcatagtattccatggtgtatatgtgccacattttcttaatccagtctatcattgatggacatttgggttggttccaagtctttgctattgtgaatagtgccgcagtaaacatacatgtgcatgtgtctttatagcagcatgatttataatcctttgggtatatacccagtaatgggatggcttgggcaaatggtatttctagttctagatccttgaggaatcaccacactgtcttttccacaatggttggactaatttacacttccaccaacagtgtaaaagcgttcctatttctccacatcctctccagcacctgttgtttcctgactttttaatgatcgccattccaactagtgtgagatggtatctcattgtggttttgatttgcatttctctaatgacccgtgatgatgagctttttttcatatgttggttggctgcataaatgtcttcttttgagaagtgtctgttcatatccttcgcccactttttgatggttttttcttgtaaatttgtttaagttctttgtagattttggatattagccgtttgtcagatggatagatggcaaaaattttctcctattctatagcttgcctgttcactgtgatgatagcttcttttgctgtgcagaagctcttcagtttaattagatcccattggtcaattttggcttttgttgccattacttttggtgttttagacatgaagtgcttgcccatgtctatgtcctgaatggtattgcctaggttttcttctagggtttttatggttttaggtctaacatttaagtctttaatccatcatgaattaatttttgtataaggtgtaaggaagggatccagtttcagctttctacatatggctagccagttttcccagcaccatttattaaatagggaatcctttccccatttcttgtttttgtcaggtttgtcaaagatcagatggttgtagatgtgtggtattatttctcagggctctattctgttccattggtctgtatctctgttttggtaccagtaccatgctgttttggttactgtagccttgtagtatagtttgaagtcaggtagcgtgatgcctccagctttgttcttttggcttagaattgtcttggcaatgcaggctctttcttggttccatatgaactttaaagtagttttttccaattctgtgaacaaagtcattggtggctttatggggatggcattgaatctataaattaccttgggcagtatggccattttcacagtattgattcttcctatccatgagcatggaatgttcttccatttatttgtgtcctcttttattttgttgagcagtggtttgtagttctccttgaagaggtccttcgcatcccttgctagttggattcctaagtattttattctctttgaagcagttgtgaatgggagttcattcctgatttggctctctgtttgtctgttattggtgtataggaatgcttgtgatttttgcacattgattttgtatcctgagactttgctgaagttgcttatcagcttaagtagattttgggctgagacagtggggttttccaaatatacaatcatgtcgtctgcaaacagggacaatttgacttcctcttttcctaattcaataccctttatttctttctcttgcctgactgccctggccagaactttcaacactatgttgaataggagtggtgagagagggcatccctgtcttgtgccagttttcaaagggaatgcttctgggttttgcccattcagtatgatattggctgtgggtttgtcataagtagctcgtattattttgagatacgtcccatcaatacctagtttgttgagagtttttagcgtgaagggctgttgaattttgtcaaaggacttttctgcatctattgagataatcatgtggttttttgtctttggttctgtttatataatggattatgtttattggtttgcatatgttgaaccagccttgcatcaaaggatgaagcccacttgatcttggcagataagctttttgatgtgctactggattcagtttgctagtattttactgaggattttcgcatcaatgttcatcagggatattggtctaaaattctcttttttttgttgtgtctctgccaggctttggtatcaggatgatgctggtctcataaaacgagttagggaggattccctctttttctattgattggaatagtttcagaaggagtggtaccagctcctctttatacctctggtagaattcggctgtgaatacgtctagtcctggactttttttggttggtaggctattaaatactacctcatttacagagcctattattggtctattcagggattcaacttcttcctggtttagtcttggggggttgtgtgtgtccaggaatttatccatttcttctagattttctagtttatttgcgtagaggtgcttctggtattctctgatggtagtctgtagttcgtgggatcgatggcgatatcacctttgtcattttttattgcatctatttgattcttctctcttttcttctttattagtcttgctagtggtccatcaattttgttgatcttttcaaaaaaccagctcctggattcattgattttttgaagggttttttgtgtctctatctccttcagttctgctcttagttatttcttgccttctgctagcttttttagagaagcaagtgtttgctcttgcttctctagttcttttaattgtgatgttcgggtgtcaattttagatctttcctgttttctcctgtgggcatttggtgctataaatttccctctgcacactgctttaaatgtgtctcagaggttctgttctgttgtatctttgttctcattggtttcgaagaacatctttatttctgccttcattttgttatgtacccagtagtcattcaggagtaggttgttcagtttccatgtagttgagcagttttgagtgactttcttagtcgtgagttctagtttgattgcactgtggtctgagagacagtttgttaaaatttctgttcttttacatttgctgaggagtgctttacttccaactatgtggtcaattttggaataagtgcaatgtggtgctgagaagaatgtatattcttttgatttggggtggagagttctataaatgtctattaggtccacttggtgcagagctgagttcagttcctggatatccttgttaactttatgtctcgttgatctgtctaatgttgacagtggggtgttaaagtctcccattgttattgtgtgggagtctaagtctctttgtaggtctctaaggacttgctttatgaatctgggtgctcctgcattgggtgcatatatatttaggatagttagctcttctcattgaattgatccctttaccattatgtaatggccttctttatctcttttgatctttgttggtttaaagtctgttttatcagagactaggattgcaacccctgcttttttttgttttccatttgcttggtagatcttcctccatccctttattttgagcctatgtgtgtctctgcatgtgagatggttctccttaatacagcacactgatgggtcttgactctttatccaatttgccagtttgtgtcttttaattggagcatttagcccatttacatttaaggttaatatagttatatgtgaatttgatcctgtcattatgatgttagctggttattttgctcgttaattgatgcagtttcttcctagcatctatggtctttacaattggcatgtttttgtggtggctggtaccagttgttcctttctatgtttagtgcttccttcaggagctcttgtaaggcaggcctggtggtgacaaaatctctcagcatttgcttgtctgtaaaggattttatttctctttcacttatgaaacttagtttggctggatatgaaattctggtttgaaaattcttttctttaagaatgttgaatattggcccccactctcttctggcttgtagagtttctgctgagagatcccctgttagtctgatgggcttccctttgtaggtaacccagtctttctctctggctgccctgaacagtgtttccttcatttcacctttggtgaatctgacagttatgtgtcttggagttgctttactcgaggagtatctttatggtgttctctgtgtttcctgaatttgaatgttggcctgccttgctaggttggggaagttctcctggataatatcctaaagagtgttttccaacttggttccattctccccgtcactttcaggtacaccaatcaaatgtaggtttggtcttttcacatagtctcatatttcttggaggctttgttcatttctttttactcttttttctctaaacttctcacttcatttcattcatttgatcttcaatcactgataccctttcttccagttgatcgaatcggctactgaagcttgtgcatgcatcacatagttctcatgccatggttttcagctccatcaagtcatttaaggtcttctctatgctgtgttttctagttagccatttgtctaatcttttttcaaggtttttagcttctttgcaatgggttcgaacatcctcctttagctcggagaagtttgttattaccgatagtctgaagccttcttcactcaactcgtcaaagtcattctccatccatctttgttctgttgctggcgaggagctgtgttcctttggaggagaagaggccctctgatttttagaattttcagcttttctgctttggtttctccccatctttgtggttttatctacctttggtctttgatgatggtgacatacagatgggtttttggtgtggatgtcctttctgtttgttagttttccttctaacagtcaggaccctcagctgcaggtctgttggagtttgccggaggtccactccagaccctgtttgcctggttatcaccagcggaggctcagctggaaatgcagaaatcacctgtcttctgcatcgctcacgctgggagctgtagactggagctgttcctattcagccatcttggaacctcctccttgttttgttttttgagacacagtctcacttactctgttgcccaggctggagtgcagtggcctgatatctgctcagtgcaacctctgcctcctgggtttaagtgattctcctgccttagtctcctgagtagctgggattacaggcgcatgccaccatgcccagctaatttttgtattatttgtggagatggggtttcaccatattggccaggctggtctcaaactcctgacctcaggtgatccggctgccttggcatcccaaagttctgggattacaggtgtgagccatcgcacccagcgaagagcttgagttttcgtttttgttttttttttttttttttagatggagtctcactcttgttgtgcaggctggactgcagaggcacaatcttggctcactgcagcctccacctcccgtgttcaagcgattctcctgtctcagcctcccaagtagctgggattataggcttatgccaccacagctggctaattttttgtgtttttagtagagacggggtttcaccctgttggtcaggctggtctcagactcctgacctcaggtgatccacccacctccaccttccaaagtgctggaattacaggcatgagccattgcacccatccccaagagcttgggcttttaaggaaccaaaaggcaactgatgtgactaaagcaagggctttcaaatgctagaccggatgtagaagatgataataagggagaactgtggctgtttccaaggggtcttgctagatcagctgagttgatggcaaggccatttatggaggtacagaattctgggaaagataaggtttgggtagggagaaggaagaattccctttgggggagcatttttctgaggtgttttcatatttgttctcaccacttcacacttgttctgtaatacgtccaacactaaggttttatcaggtcatttcctcctcttcgtcagatttcagcttataagtctccttcaccagattagtaagtttccatctaatcctgttttccttcttcttcataggatgcatgctcctggcctgatacttctcattccagtatcaaaagctatgaaccaggaaacttcttccttaatacttttgattcaatatatctttccactcataaccttatctccttttaccttcagaagcatgaccttaagaaaagttctattgaagaaggtgaaaataaaaagtttattatttcttacttggttatattgtttgttcacaatgtgagaggcatgtagggggtgtcattgtgggttttagggtggctcttcacaaggcattccaaaacaatagcacacttcactgctgagctgtatcagttccttagcaggtagccacaaggaggaaagagagggcacggtggatcttcttggtgatacaaacatggtaataacttttaggatctctttttcttacaggtttattaacttaaacaaaaatggacagggcagctgcttcagccacagttaagtgctccattgtctctacacagtattaggagcacctttaaaccttgaacaaattccacaggctccacctctcaccttctattccactcctctgccccgctctccttccccagttgaatctgtcagaggtggccagcatcacctggtcctgaccaagatggtgctgatccaaaacttcaagaggaatggggaagagggaagtcaggtactcagagatgactggaagtgggtttatgttccatgtcctcatccaggttttcatggagacttctctgacatcagccttgtgctcctctgctagttgtcttatattgtgtaacctaatagaggaagcaagctctcatgcccaaaaggtgcaagtcacttcgctgtctggttctgcctccctgaaactggtgaatgtttcatgccactcattacatctcttgtgataactgtttcaaacttaaaaaccaaacaaaaaaactttttaaaattagaggagtagtatggagcacataattagatttgcctacctctcaggagacctaaaattccacttctcaaaaaaaactcatttattttcctgtctttacttccagtgctccacgtaattgccgatccttcctgcatcttccggggcttgggcatatgacagtaagatgctcaacaagttcattttctacttctatgcataatacatttttggtgaatctttccaggtcttaattcttttcattttctgtgtgacctaactgaggaaaccatcctggctttctttttttttggagacggagtcttgctcagttcaccaggctggagtgcggtggcgtgatctcggctcactgcaagctccacctcctgggttcacgccattctcgtgcctcagcctcccgagtacatcctggctttttaggctgctccaagaagttctgttctatcctttacctatagggattctagtccctacctataaggattccagggtgtcagttctgaccttgtccctcttttgtcctctgctgagcccagcaagccatcatcttaatcatacaaaaccaaaatacctaaaggggaaggtcagacctgctacctagccatttagtttggaaaatgcaaacatttattttctttgttccgatagaaaatacctcctacttcagtgacttcaaactggcataagctaataaatgaagctagctcagaagtgtatactttctgcttcatgggcctgaagagtcaccacaatatagacatactagagcagtggcagagtccagcctgcaagtgtctgggtttagaaactaacagatatttcaagttctttatagactaggcattaaaaagctactagaacagagggtgtagcatttatggagatgaggccgcacactaaatccttctacagaatcatctggtacaagccctgtaagacacatttttctaaactggcattccccagtgccaactgaattttgtatgggccacaaaatattaagttctgcttttccaaaccatctaacagctggatagatcatgaaaggtagtttgggaattgtttcctgttttatatttcaagtacctgacttctgtttgtttcagccttgcataagtttctctccattatttctggcttttcagtgtctgggaaatctgtggcattttttttttattagaaaacatagtattgggtcttgaatttgttctcttaaaagaaaattactctgtaagcatgggccaagcgtcaggaactcctcagaatcagattctgctcccaaacatttttgcagaagcttcatcttgtaccatttatgaactgcttatagcagatgtcttggtgggaagagggtggatactggatgtatcaggcctatcagctgctgtgcagcctgggacaggttttcttcagatttctgtgacccctggtgaaaaaggaggaactgtgtcaggccccagctatatcttaaagatgtaggagactcctaagtctgaggattcctcagtcctttaggacacttccttcttgcagtaaacttgagtctttcttacatccttgccttgtgacccttttatttccagacctgaaaaaaaatacagagaaacttattttttaaactctgagtggtcttgaattcaactatttctataacagtctatggctccttaattccagaacctcagaaaacagttgtgaaattatttgatgattctttcagtaagaaggtagctgctgcttagtgacaatttggatatttgagaaaaaatttttaaaaataaagtacctatctatctccatagttagaattgcccaacacctgattttggtatagaaactgctgttactttgccccttgtttcctgctatgtgagttcctgagcatcttcaacatctctccatcactttttctcccacacttttcaggccttggagtaccttttcaagttcattgtacagtcacggatcctgtactcacgagccacttgtggaatggaagaggaacaattcagatccagtatccaagaacttttccagtccatccggtttgtgctcagtctggacagccgaaactcagaaacactcctttttactcaggttcgcacactgcagggaagctttgatgctgggttcctctttctcagtgggtggtttctttgtcctctggttttcagagatgaagaagccctgccaggatcatgtgtgttgggtaagggattatttacaaggaaatacctgatacaacaaaatgctgcttttactgcaaatctggctgtgcctcagctgccagatgtaaaacagctcagtggctttatgttggagaagaagcacaaatttgttctgtgaacagtctttagaccaagtttatttagctaccatactacttagttttttatgaacaccttattcataggagatattgagaatgtatggggaattttatttccagattaatcattgtattaatgaaaattgagcacagtggctcacacctgtaatcctagcactttgggaggccaaggtgggcggattgcttgagctcaggagttcaagaccagcctgggcaacatgatgaaaccccatctctactaaaaatacaaaaaaattagctgggtgtgctagcatgcacctgtagtcccagctactcaggaggctgaggcaggagaattgcttgaacccgggaggcagaggttgcagtgagccaagatcgcaccactgcactccagcctgggcaacagactgagactctgtctccaaaaagaaaaagaaaaaaaaagaaaatttagattagcttttatccattccagaagttgaatgaaataatttgaaaaacagtaggagtaactaggaatctttggctaagaattaagattaaattaggatcagagggctggcaagatggccaaataggaacagctccggactgcagctcccagcgagatcaacacaaaaggcaggtgatttctgcatttccaactgaggtacccggctcatctcattgggactggctagacagtgggtgcacccatggagggcaagcagaaggagggtggggcgtcgcctcaccttggaagtacaaggggttggggaactccctcccctacccaagggaagctgggagagactgccttgaggaacagtgcattccggcccagatactacgcttttcccatggtctttgcaacctgcagaccaggagattccctcaggtgcctacaccaccagggccctgggtttcaaacagaaaactgggccactgtttgggcagacactgagctagctgcaggagtttttctcataccccagtggagcctggaatgtcagcgagacagaaccgttcactcccctggaaagggggctgaagccagggagacaagcggtctagttcagtgaatcccacccccacggagcccagcaagttaagatccactggcttgaaattctcactgccagcacagcagtctgatgtcgatctgggacactcaagcttggtcaggggaggagcatccaccattacagaggcttgagtaggcagttttcccctcacagtgtaaaaaaaagctgacaggaactttggacaaggcagagcccaccacagtgctgccaagccactgtagccagactgcctctctagattcctcctctgtgggcagggcatctctgaaagaaagacagcaggcccagtcaggggcttctagatccaactcccatctccctgggatagaacacctcggggaaggggcagctgtgggcacagcttcagcagacttaaatgttcctgcctgccggctctgaagggaatgggagatctcccagcacagtgctcgagctctgctaagggacagactgtctccttaagtggatcccttacccccgtgcctcctgactgggagacatctcccagtaggggatgacagacgcctcatacgggagagctctggctggcatctggtgggtgcccctctgggacgaagcttccagaggaaggaataggcagcaatctttgctgttctgcagcctctgctggtgatacccaggcaaacagggtctgaagtggacctccagcaaaccccagcagacctctaacagaggggcctgactgttagaagaaaaactaacaaacagaaaggaatagcatcaacatcaacaaaaaggacatccacacagaaaccctatccgaaggtcaacaacatcaaacaccaaaggtagataaatccaggaagacaaagaaaaaccagtgcaaaaaggctgaaaattccaaaaaaccagaacgcctcttctcctccagaggatcacaactcctagccagcaaggtaacaaacctggacagagaatgagtttgatgaattgacagaagtaggcttcagaaggtgggtaataacaaactcctccaagctaaaggagcatgttctaacccaatgcaaggaagctaagaacctcgaaaaaaggttagaggaattgctaactacaataaccagtttagagaagaacataaatgacctgatggagctgaaaaacacagcacaagaactttgtgaagcatacagaagtatcaatagccaaactgatcaagtggaagaaaggatatcagagattgaagatcaacttactgaaataagtcgtgaagacaagattagagaaaaaagaatgaaaaggaacaaacaaagcctccaagaaatatgggactatgtgaaaagaccaaacctatgtttgattggtgtacctgaaagtgacagggagaatggaaccaagttggaaaacactcttcaggatattatccaggagaacttcctcaacctagcaagacaggccaacattcaaattcaggaaatacagagaacaccacaaagatactcctcgagaagagcagccccaagacacataatcgtcagaatcaccaagattgaaatgaaggaaaatatgttaaaggcagccagagagaaaggtcaggttacccacaaagagaagcccatcagactaagagcagatttctctgcagaaaccctacaaaccagaagagagtgggggccaatattcaacattcttaaagaaaagaattttcaacccagaatttcatatccagccacactaagcttcataagtgaaggagaaataaaatcttttacagacaagcaaatgctgagagattttgtcaccaccaggcctgccttacaagagctcctgaaggaagcactaaatatggaaaggaaaaaccggtaccagccactgcaaaaacataccaaattataaggatcatcgacactatgaagaaactgcatcaactaacgggcaaaataaccagctagcatcataatgacaggatgaaattcacacataactatattaaccttaaatgtaaatgggctaaatgccccaattaaaagacacagactggcaaattggataaagagtcaagacccatcagtgtgttgtattcaggagacccatctcacatgcaaagacacacataggctcaaaatacagggatggaggactatttaccaagcaaatggaaaaccaaaaaaagcatgggttgcaatcctagtatctgataaaacagactttaaaccaacaaagatcataaaagtcaaggatattacataatggtaaagggatcaatgcaacaagaagtgctaattatccaaaatatatatgcacccattagaggagcacccaggttcatagagcaagttcttagagtccaataaagagacttagactcccacagaataatagtgggagactttaacatcccactctcagtattagatcagtgagacagaaaattgacaaggatattcagaacttgaaatcagctctggaccgagtagacctgatagacatctgcagaactctcctccccaaatcaacagaatatacattcttctcagcaccacattgcacatattctaaaactgaccacataattggaagtaaaacactcttcggcaaatgcagaagaacagaaatcataacagtctctcagaccacagtacaatcaaattagaactcaggattaagaaactcactcaaaaccacacaactacatggaaactgaacaacctgctcctgaatgactactgggtacataacgaaattaaggcagaggttctttgaaaccaatgagaacaaagacacaacataccagaacctctgggacacagctaaagcagtgtttagagagaaatttatagcactaaatgcccacaggagaaagcgggaaatatctaaaattgacacccaaacatcacagttaaaagaactagagaagcaagagcatacaaattcaaaagctaacagaagacaagaaataactagccgggcttggtggctcacacctgtaatcccagcactttgggaggctgaggcgggcagatcatgaggtcaggagatcaagaccatcctggccaacacggtgaaaccccgtctctactaaaaatacaaaaaattagccgggcatggtggcggttacgtgtagtcccagctactagggaggctgaggcaggagaatggcctgaacctgggaggcggggcttgcagtgagccaagatcgcgccaccacactccagcctgggtgacagagcgagactcagtctcaaaaaataaataaataaataaataaataaataacttagatcagaacagagacacaaagaatccttgaaaaaattaattaatctggaagctggttttttgaaaagattaacaaaatagatagactgctagccagactaatgaagaaaagagagaagaatcaaatagacacaacaaaaaatgtgataaaggggcaatcaccactgatcccacagaaatagaaactaccatcagagaatactataaacacctctgtgcaaataaactagaaactctggaagaaatttataaattcctggacacatgcgccatcccaagactaaaccaggaagaagttgaacccctgaatagaccaataataagatctgaaattgaggtagaaattagcagcgtacaaccaaaaaaatcccaggaccagacggattcacagccaaattctaccagaggtacaaagaagaggtgataccattccttctgaaactattccaaacaatagaaaaagagggactcctcccgaactcattttatgaatccagcatcatcctgataccaaacctggcagggacacaacaaaaacagaaaatttcaggccactatccctgatgaacattgatgcgaaaatcctcaataaaatactggcaaaccgaatccagcagcacatcaaaaagcttatccaccacaatcaagtcagcttcatccctgggatgtaaggctggttcaacctacacaaaaaaataaatgtaatccatcacataaacagaaccaatgacaaaaactactttattatctcaatagatgcagaaaaggccttcaataaaattcaacatcacttcatgctaaaaactctcaataaactaggtattgatgggacgtatctcaaagtaataagagctatttatgacaaacccacagccaatatactgaatgggtaaaagctggaaatgttccctttgaaaaccagcacaagacaaggatgccctctctcacactcctattcaacatagtattggaagttctggccagggcagtcaggcaagagaaaaaaataaagggcattcaaataggaagagaggaagtgaaattgtctctgtttacagatgacatgattatatatttagaaaaccccattgtctcagccccaaatctccttaagctgataagcaacttcagcaaagtctcaggatacaaaaagcattcctatacaccaataatagacaaacagagagccaaatcatgagtgaacgcccctttacaattgctacaaagataataaaatacctaggaatacaacttagaagggatatgaaggaactcttgaaggagaactacaaaccactgctcaaggaaataagagaggacacagacaaatggaaaaacatcccatgctcatggataggaagaatcaatatcgtgaaaatggccatactgcccaaagtaatttatagagtcaatgccatccccatcaagctaccactgactttcttcacagaattagaaaaaactactttaaagttcatatggaaccaaaaaagagcccgcattgccaagtcaatcctaagccaaaggaacaaagctggaggcattatactacctgacttcaaactatactacaaggctacagtaaccaaaacagtatggtactggtaccaaaacagatatatagacgaatggaacagaacagaggcctcagaaataacaccacacatctacaatcatctgatctttgacaaacctgacaaaagaagcaatggggaaaggattccctatttaataaatggtgttggcaaactggctagccatatgcagaaaattgaaactggaccccttccttacaccttatacaaaaattaactcaagatgtattaaagacttaaacataagacctaaaaccataacaaccctacaagaaaatctaggcaataccattcaggacataggcataggcaaagatttcatgactaaaacaccaaaagcagtggcatcaaaagccaaaattgacaaatggaatctgattaaactaaagagcttctgcacagcaaaagaagctatcatcagagtgaacaggcaagctatagaataggagaaaatttttgccatctatccatctgacaaacggctaatatccaaaatctacaaagaacttaaacaaatttacaagaaaaaaccatcaaaaagtgggcgaaggatatgaacagacacttctcaaaagaagacatttatgcagccaaccaacatatgaaaaaaagctcatcatcactggtcattagagaaatgcaaatcaaaaccacaatgagataccatctcacactagttagaatggcgatcattaaaaagttaggatacaacagatgctggagaggatgtggagaaataggaatgcttttacactgttggtggaagtgtaaattagttcaaccattgtggaagacagtgtggtgattcctcaaggatctagaactagaaatacatgtgacccagcgatcccatttctggctataaacccaagggattataaatcattctactataaagacacatgcgcacgtatggtttttttctttcttttttttttttttttgagatggagtttcactcttgttgcccaagctggagtgcaatggagcgatcccagctcactgcgacctccacctcccgtgttcaagtgattctcctgcctcagcctcctgactagctgggattacaggcgcatgccaccatgttcagctaattttttcattttttattagaaatggggtttcatcctgtttgccaggctagtctcgaactcctgacctcaggtgatccacctgccccagcctcccaaagtgctgggattacacgcatgagccaccgcgcccagccacacacatacgtttattgcagcactgttgacaatagcaaagatttggaaccaacccaaatgcccatcagtcatagactagataaagaaaatgtggcacatatacaccatggaatactatgcagccataaaaaaggatgagtttatgtcctttgcagggacatggatgaagctggaaaccatcattctcagtcaactaacacaggaacagaaaaccaaacaccacatgttctcattcataagtgggaggtaaacaatgagaacacatggacacagggaggggaacattacacacctgggcctgttgggggtcgggggactaggggagggatagcattaggagaaatacctaatgtagatgatgggttgatgggtgcagcacaccaccatggcacgtgtatacttatgtaacaaacctgcacattctgcacatgtatcccagagcttaaagtataataaataattaaaacttcaaaaaaagattagattagattcaatattagaaatatcagtatgggaagaaaatttgctttcttatattaaaactacctgaccaatcacctgagcccaagaagttaaggctacagtgagctgtgattgcaccactgcactccagcctgggcaacagagtgaaactctgtctcaaaaacaaacaaaactgcctggccagctaatctgttacctttccacacagccttaccctagaacaaatcaagaattcattaccccagtcaaaagggagatatttttccttacaaatgaatgtcagaatttttatgtaatagtgtatagttcttcaactttttgaagctaaatattacaccaaaacctgtcagcaaagatcagacagcctctctcatgtccagtcattcagtcactgccaggtatattgttagcccaagtatatatttaaactctgcctcatttaagattaaaatagtctacttttttgttttccgcttgcctctgtgttgcctcttgataccagttgcctataggtttctcagcccagaggacaggtgatcaactgggagtaccttaaggcttccttgactctgtaagggagtggactctataagggagtctataaggaactctataagggagtacctgaaggcttccaggtgcttctgtaagaaagacacctgtgatctccccttctaagtaccttaagctgctcatcttcctttttgattcccctcccacagccaaaatatggagagattagaggtagctagcaaagcaatgcagatatgctttctgggaactttgtaacacaataatgccctgtactgagtggcacactcctactacatcaagataaatagcttagatctggtctcggctaagacctgtgtgagaatcagaccttcttctttggtgcaaggctcatgtttcctgagtttcacaactctctctctctctctctctcactgtctctctctctctctctctatatatatatatttatttatacgtataataatatacatataataatatacatatatatgcatatatatacataatatatatatgtatattattcagttagactttatatctttgattatgaccactagaagatgtcagggtgtgagagtccttctgtcctggtgtctaagtacaggatattttaccatttaagagagcaaatgagttactgtttgttattgattataaagcacctactttaccactgctttgtcttttatatctaagctgccaatgatatgttttgttctgattctaattactgcaaaacaatctccttgatattccagggagttataaatctgcagatagaattcatataagttctccaattgggcctggcctgaataaagaccacagcacaagcctgttttccatggcataaattttcactcactctaagccagtgtctgttgcctgatggagcagtcaagaaaacagccttccctccccagcctgccatttgggaagggtgcattctcacctttttgtctcaagatggcactccatttctctttgtaaatcctgagttaatggcataaggggactgagaagtgaaaagtcttcatgctgcttccacttagacaagagaaaataataagaaccagcatgtatcaaaggcctattgtgttccaggcactctactagaaactttatgtaaaaatttccctcataccagtatcaagacataagtaatagcatcatccccattttatagatggggaaacagagaattaggcagtaacttgccaaagtttgtgtgtcaggtaagcggtaaagcttggatttgaactcgtgtctaattccaaaacccattctctttttcctatagtgctctgcctcccaaaggctgtggaactgttctattatcagattgttctcaagaaactaccttatggtctgccagagcttacatcctagaagaaaagcctaacatgcacactcccactccccttgcttgggtgtttaggtggctgaactctaagcccacgtcaacagtcctcaagagtttatggctaactaaatacacacatttcccatcctcttgaatttactcttgagactaccaggcatcacttatgaagaaaataatttatgaagtcttcatatttcatggttgcaaatgagaatctctattctggggaaatggtacagctctcagaactggatcactggctgcagggctgtgagcagagttcagctggtgctgcttgaaggaactcagctctctctgccatactttcttgagtttggaaccaaaattggaaagttaagaacttgatcatagagacaaacaaaaatctaaatccattttatgaacaaaaacaactgtggatcttaagccacattgagcagatttttctttataccccattctcttgccagcaaatgctatatgcaagttatgaaagcctccaattgcctggatcccagtaaattatcttgttttggtttcctttttggtttttcttgctccatgcctgagtgctgtagtcagtggccagggaggagcccaccgaaggcagagatgctacagtgccttctcagcctctcaccaccttgtatcattgtctgagcatgaaagatagacacacaccctaactctgtgctaaccacagcttcatttgcttctgcaggctgcactcctcaattctttcccaaccatctttgatgagcttctgcaaatgttcaccgtgcaagaggtggcagagtttgtgagagggacactggggagcatgcccagcactgtgcacattgggcagtcaatggacgtggtcaagctgcagtccattgccaggacagtggatagccgcctgttttctttctcaggtaaatcaagttgggatgagagtcctccttccttccaggggtgtcctccttccttccaggggtgatagcaaagtgataatcaaaggatcagtttcctcaacgattatgcaagaaaccagtaacccttaagatacagaattttttgataaactataatagagaatgcagccaagacctaggcctactgccttactcacagtttattcctaggaatccacacataggggcatgtcactggggtggtgctgagtccattcaggctactgtaacagaataccatagactgggtggcatgnnnnnnnnnnnnnnnnnnnnnnnnnnnnnnnnnnnnnnnnnnnnnnnnnnnnnnnnnnnnnnnnnnnnnnnnnnnnnnnnnnnnnnnnnnnnnnnnnnnnnnnnnnnnnnnnnnnnnnnnnnnnnnnnnnnnnnnntgctagtagtagtaaagctgccaccaagaaagtcatgttttgtgcaccaggaactgtttatgctggtaaacagttctctcttctccagctcctatactgaagattttattaatggtttggggcacactgtcactgaaggccactgtacacacttgagctttgtgcactgcttaaagaaaatgcttttggccgggcacggtggctcacgcctgtaatcccagcactttgggaggccaaggtgtgtggatcatgacatcaggagatcgagacatcctggctaacatggtgaaaccctgtctctactaaaaatacaaaatttagccaggcatggtggtgccgagatcacgccaccgcactccagcctgggcgacagagtgagactctgtctcaaaaaaaaaaaaaaaagaaagaaaatgctttcaaaatatatgggaaggggaacagcagactgctctcactgacatactttatttctaatatctctgcatgtacttgctgcttcacacaaacacttcagaaaaattttcttaatatttatgtggccctggactatgtaattggattttagatgacaaacagcaccaaaatttcatttgcatctcactttcattgaatgcctgagttgcagcatcttccctgaagcaaaaggttctttaccagtgatgtcctttaaccagcactggtattctcaaagtataagtttggtctcttcttcagcaggttctagtaactaaccactgtttttttctgtaagcagctattggttgttacaaaaactaagtatgttggtattttcatctacatagtgcagtatcaactttttttattcaagcagccttttaaatctagactagctagtattctattctgtttgaacatattctaagcatttgacaaggcagtgcccaaatctcttatatgtcatgtactttgtctttgactgaaaaagatttgctgtctgaatttcatatggaactcttaacaaaggacagatatgaacgataaatctaaaatgccatggcttgtttgtgttactgataatctgactaaatcatgctagccagatatgatgggacctgcagagtcacacaatcactgaccacgtaggaatacagggtgccagaaacgcattcacacttgtatttcacatgtctcctaaccttccttgtgaagtaaatgtattatagaagaggcccttacaccccattctacagatgaggaaaataaagctcgtgagaggagtcaacttgcctgaggtctcagaacgggttaataagggagcttgaagtaggacagccttcctgaatttaggattgtaaatatagtcagctcctgatgaaagtgctattcggtaacactgggagaaatcatttgaagtgttcagtaggattggtgataaatgttggctaattatcaaagtcttgtgacaagacaaaggtcatgcttcaattgtgttcattgctgtatacacactgagcagcaatctaacaagcctgtgggggaaagggagcaggcctgttggctgtggcaaggtaaacactcacaggggtggaagtgtcagactacctatctagccagggcataaagagggacaatctataatccatttcaagcctgtgagttcagtcagcgtagttcatactaagtataccatttaaatggaattttcactgtaaactgtgcttctaatttggagtctaatcattaaagagatttcatttgggaccaggtgtggtggctcacacctgtaatcttagcatttggggaggacaaggagggaggatcgcttgagcccaggagttcaagactagctgggcagcatagtgagacctcatctctacaaaaaattaaaaaattatccgagtgtggtgccatacacctgtggtcccatatgcatgggaggctgaggaaggaggattgctctagcaatcctagaaagttgaagctgcagggagccatgattatgcccctgcattccagcctgggtgacagaatgagaccctgtttccaaaaaaagatacttcatttagaagcagactcctaacattcatcctgcacaaaatgtcatggatgcttggtattgaaatgagaacaaaggaaagatggaagaataatgtcatgtgatggcttataatctccaggcagtgagctttcaggcccttgtaaggtaaggagattaccttcacttttgctctagtctgaaccccacctgctttgagaatagctaagtcccacaatgccactggcttcctgcagtagctagttctcctctaaagttttcttcacctttgtattttctctcccagaatcccgccgcatcctgcttcctgtggttctccatcacattcaccttcacctgaggcagcagaaagagctgctaatttgctcagggattcttggcagcatcttctccatcgtcaagaccagctctctggtagtggccccacacccactccaccctgttcagctcttccctagtcttgtgttactttagccagaggcagaccaacaaagatcgctttgtacacttttcagtcacagatgctttcatcagtgacaggaaggtgcccaagtgaatggagccctgtgtgttcccagcaggtttgtcagtacaacacattcttgctatttttaaaggttgcactaccataaatctacccagaaatatagttatctgtagtaccacaaagcccaattctgtgtcatgctgtttccatcaataggttttaattctggattcttgggagttttctgagaatattcaggcatgagcacagggaggcagacccagacttgagaggtagcttgcttattcaggctcttctgttagcttcctgacagcttgattccacccatatggcgttcctatactgtgccaaatgaggtcagggcatacgagaggttaatgttgcccaccagagctctgagcctcagaggatggtagaattgtgctttaggggtcgggtttcaactgatattgcttttacccattttctttcctctctattttttctttttaaaagaaatcagtggtaagaggggatgaactgaggtagggaaagagagaaggaaagatatgaattaggcacgggtgagggtaggaatttattttaatgatacttatttcatgtacttttgataatagaagaaaggcatattacttatagaaaattcagaaactatagaaaagcataaggaaagaaatgtagaacaaaaatggatttttaaattataccattttattaggttgctagagaatagaatttcacatgcatttaaaatgaagggcagttgccaggtgataagaatatacaaggataggctatccacatggagtgggagaggcaccttaaaaaaagagtatattttgttcgagcaggggacagggactcaataggatactctgatgttcaaacttaaagtgccatctggtgacaggggtctagcttggcagagagtgactatgatggtgataatggccctattatttgatcttggctccaggtaagacttggcagctcttcttcccaccaggcctcagagaagccacaccaagcacataagatctactcatagcccaaggttgtattgagggggtggacagcttattgctaaaggaaggagagaaattgaagcaaaaaaagaggaggaatggaacacaagtgggaaccagtaaaaacttggaggtgacggtttggttgtgtttgtggggctagagtcagtgtaattagttgcttataactacccaaagatacatcactggtaagtgttatgatcagttcgacagataggaaagatgactttggtcccaagagctgctcaaattcttcatgtggaatggggcagagtatagttaaaatggatggatgggtagagggacaatgaaactgaagctcaatgagagcagagatattatctctcgttcacctctatatattcaggttctcaaacagtgactggcacatggtaaatgtttagtgaatgataaatcgatggatgggtgaaagatagacaccaggaccagtagtagtataaacatcttagacgaggggcaacaggaatctctttgtgagataattaaaatcatgctacagaatttgagatgaatgtgagaagtctataataggataatagactcttcctaaattaggaagtggcccttagtgaggagacatgctccattgtttttgtgaggtggccagagaaagatgcactgaggctggagtccttcaaatggaccctgtaacacgagcaagagagctgaggagctagaagtggacccaggcatatctaggcagcagtcccggctggcaaaaattgagggcacccaaggggaagaccctgaggagaaaacagcgtgcttagaaagatgagctacttctgtgcattagtgctatgcactagtgaaggtgcagctgccacaccctgtagtgtgaatttgtcaccatttctcaaactttatcattccaaaagtgtcagcagagttttgccttctcctgactattctagggaaatcaaagaaaacatttaactcaagatctttgcttctgccctgtatatcaaaattaatgtatctgcttgagattcaaagttgcaggtggtgttgagttagggtaaggccccagccaccatgcctgggcagcagtggcagttgtgcctcacctcctgtcaaagccattgtcctgggtgccttgacactgcatgttggtgagactgagagcttggtgttgggaatccagaagactactgctgatgtggctgacctagtaagtgctgccagctgtacttcagcctggcttgctgctaatggtgtgctctcttgctgctcgctccaggaggcagatgtcatggaggaagtagagatgatggtggagagcctcctggacgtgctcttgcagactctgctcaccatcatgagcaaatcgcacgctcaggaggcggtaagagggcagcggtgcccgcagtgcacagccgagatcactgttagtaactaacatccaggttttcttgccttcttttctaacccggggcttctccacaacactccccctccatcttaccatcccaccaccttcatctcagccttccctcctgcatggttgtcagcatgctgccctcttcccttcttgagtctgactctcctctctactctgaaagctctaggttcacattcccaggactcttctttagggcagatctggggaatgtttcttgtcctgttttcctgcatactttgagccaagtcattttctatattgtagaatgaagctgggatgtatgtaagatgtagtaagaggttgaaggtgaaaaacagactatttcttctaggaaccccctcatacaggttctcctaaatgatgtacaggacagaataattttctcagaattggcttctatctacaaattagttgcttttgtccattatgtttgtatctaaatttttagcatttggaaaaatatgatgaggtaaatttcactggcattagtgaataacgatttttctgtgatctaattagaagagaaacaaactgggaaggcttctcaggaggggcagagagacaataccttgggcccctcatgcaccccaactccagagtagacttacttctcagccctgaggtggggatgtgataaacagttttcgtggaatctttccattggcagatgggagattacagtgatctctctgaagaaaaccctctggagcaagccaagctacagcgtgctagggagagcagggagcactcagggagcaggtatgtgttctggagcactgggcttggaaagagtgtctgctcctttaggagcctctgttgaaggcactctcactgtaagtaaaaaacatatatatatatatatatgtaccctggcatttcctggtaacccagccttctaaccaacacttacacagtgcttgctgtgggccagaccctgctttaagcacttgtccaatattagctcatttagcaatactaaggaagtgattcattttatgtagattataatgaggatgataataactataatttattcagtacctttttacataatggactttattcttaatgctttatgtacattaacccatctgaccctcatgacgaattacctatagcttattatgcccatttttcagataaaaatgaggttcatgaacatatatattttgcacacatgtatttttaataatttcaggccaggcgtgatggctcatgcctgtaatcccaacactttgggaggccgaggcagatggatcatctgaggtcaggagttcgagactagcctggccagcatggcgaaaccctgtctactaaaaatacaaaaaaaaaattagccgggcatggtggtgggcgcctgtaatcccagctattcgggaggctgaggcaggagaatcgcttatacctaggaggtggaggttgcagtgagccaagatcatgccattgcgctccagactgggtgataagagcaaaactccatcccaaaaaacaacaataataataatttcagagacctagaaagggtttgagagactaaaacctgttgtcactttctcatgagtttataaacatttgaaaattgcccaagtgaagtaaatgttctccctcccttttaaggaggcaactaagaggaggccatgcttgactgcctcctgccaaaagttgctgtaagatggtttttgaagtccttaaagcaggattttattccatgtattccaattggaacttgaagacattttgaacattgatatttctcctttaatttctacttgtcttaaagcccatagcttgtcccctcaaaaaggtcagttttaactcctctgcctttcagacaggcatattgatctgcgctgtgttttgtttgcccagtccagtaaccctgtgcaaattctaggaggttccaaagaagtccttgtagaagggctgctctagtccagcaggatcggcagagtccaaattctgtccagagagggttaagctctccccttttccaagtatcctctatagacttcagtacagtgccctggcagcaaaggactatttagccaaaactttcctaggaaaaaaagggagaatatttgtctcactttgcagtactactttattatagtttaaggtttttcagtagccccatgctgcagagggtttatttccccctaatccctccaggctttccttagcagaaaataaagctttagagggctagatttgtcatctttcttccatgatcattggggccatctcagaccctcccttctctccttgccctctatggattgggggaacacagcccttgcaattggccatgctaagtgtttttttgggttggtccctagggcgagtatgtgtcctgccttctctcactgctccgccagatgtgtgacacccatttccagcacctcctggacaacttccagagcaaagatgaactcaaggtaggcagtagaacacctttcctctgggagaggaagtgtgcagccagcactccccaggggctttttccctgtcagggggatgaatgcaagtgactagcattgccacgggtgtaggattcaccagccctgctttacagctgagtgttggcctccagaagctgaaagccagcagtgtccccacacagctggaccctcgtaacactgccaagttttccttgactattagcggccctgtgatcatgtgcctctattagaggctactctgtcccacactggttgtcagacaaccaggactccttcctttcttagtaacttggcagttacccttatattttgtacctgcaaattaggatttgctgttttaatacctttaataataataatggtgtcaatttttttcatttaaatatatttgtggaagatacctttagagagcaagggtgtgcactgctcatttgctgccaaactctgggtctggagcactgagggtcttatttttatcacagattgctatacataatttaaaaagccaaagcatactacaaagttcataatataaaacacctgtagtcctagctactcttgaggctaaagtgagaggatcgattgagcccagaaataatttttttaaaaaatacagtggtttcctggctcagcctgactcgtgtccagtccctactccacaaaggcagccactttcaattcttttgctattcttcaggaagcttctactactatttttagctattgttagttattatctattttcctctttctatggaaaatgaagatgattctccagaatcattcctctctcacacacacatccttcctcccattttcccaatgtagttttcatatatttttgtttgcattgattatattgtttatcttttctttattacagctaaataagtactgtggtgagccaagactgtcctgggattatatttcttttcttgtagaacagtgatgtccagtctttcggcttccctaggccacattggaagaagaattgtcttgggccacacattaaatacactaacactaacgatagctgatgagctaaaatatatatatatatatatatatatatatatatctcataatattttaaggaagtttacaaatctgtgttgggctgcattcaaagccatcctgggctgcatatggcccatgggccgtgggttagacaagcttgttgtcgaacttattgtttttataaaaattaattgcctctttttttatttgcttatgctttgttttgttttggtcatcaaatctggtgaggatttcccactcttgctatcatctttctaatatatctcttcttccagcttgccttatggtcaaatctatcagatgtcaggtcacttttttttcctagagatttgctcccccactgcttttatttgtttcagtcactatcttttgtgttggagactctcctcctacagactttcctatagagactcctggatgatagtgtgtatctaaaagtgaagtccttcagtgctgattacaaactctatgtataggcagggctttctctagcaggcttccctgtagatggccaaagagatctgcccttttggtcagagcattccccaattcctgtgtctggaggacttggacttgttcattccccagagaggagtcttccacttctcctgtgttgggcacaggagttcgatgtcgcaaaagatctacactgagacaaaggattcctcagcaaggctagtttactttctgcggaaagggtgcactcgccagcagtccagccacaagagcacacacaaacaaaggagatagggttatttataacctgatgcattcaccctactgctgtgtctggtttccattggctggaacgggacctcacattctatacccgacccaattggctagcaacttagaacttcccaaaagagtcaaaggcagaggagaacaaaggaagagaggaagtaacttgtggaatgctgagagaggcaaaaacacttccaaataagggagaggaataggctatggcctaattaagctataattatgccataaaattcatacttttaaagtgtacaatttaatgcttctgattatatccatcttaaaaagactcatcacaaatagtgacatcaagttaataatttaagatttccaaccaggtgcagtggctgtcacctgtaatcccaacactttgggagaccaaggcgggcggaggcagatcacctgaggtcgggagtttgagaccagcctgacctgaccaacatagagaaaccctgtctctactaaaaatacaaacttatacgggtgtggtggtgcacgcctgtaatcccagctactcgggaggctgaggcaggagaaccgcctgaacctggtaggtggaggttgcggtgagccaagattgcgccattgcactcctgcctgggcaacaagagtgaaactctgtctcaaaaaaaaaaaaaaaagaaaagaaaagaaaaaagaaaaaaaacttcccacaaagaaaagcccaggaccagatgccttaattggtgaattctaccaaatttttaaataagaattaatatcagtcctttgcaaactatcccaaaaagtagaagaggacagaacatttacctactcattgtatgaggtcagtaataaatactgtgataagaaacctggacaaagacatcacaagaaaagcaaactacaaaccaataccccttatgaatataaacacaaaaatctccagcaaaatactagcaaactgaatccaccaacatagtaaaagaattatataacatgatcaagtaggatttatcccagaaatgcaagtttagcttaacatgtgaaaattgtcaaggaatgacgtgagccacacagaaaaatatgaagctcctgactttccctctacccacagacaccaaataaacatctattcatgaatcacttccctctgagagaaggagacccattgaaagatccttacccaccaggcaactgaggaaacatccacattgaatgggtaggaaaagctgagaggcacactcaggcacagaccccacccctggcactgcaccataaaatcaggaaaggaatccttaacatttacttgctccctgtggagaggagggtttggacctcacatataccaccctaattctaagatttgccatggtttggctcctaattcaccaactctgggaggggaggaaatttgtatctctagatcacagggaaaaagcagcaattttatatgggcacacaaggacttccagggctttatcctctagaagcaatgcagagaaagggctccaaaaatgcagctccatgtgtctctcaggaacagacaaactctttcagtggacatgtggcagtctggcttcttactgacttagactggggagttaaaggagcagacaagtagtagcttgctgctagcctgagcagcagattggcacttcctgagcctcctcccccagctcaccctagtgataatttcagacaaactcctctcctggaaggagtttgtccatacattgagcatcccagcttttatagcttctacccaagggactgcatcctaaacctccccgttctgggaacaaaggggactggcatatgtgtgtccatagactacatgaaaaaggttgtggtttcgtatgggcatgtaagcacttctggggcttgatcctcctgaaacagtgcagagaagggcttgaaaacacagttcctctgtttctccctggaaggggtgtataactacttggtggtctggcttcttgagttaaagggactttacacacttacattcgtgagttaaagggacaggcaagtattggcccaccagcagcctgagaagcagattggtacttcacaggccttctcccctagctcatcccaggaacaactgcaggcctattaatccctcctggaaagaattgtccacatattgagtgctccaacttttacagcttctacccgaaggactgcatcctaaacctcctagcattgggagcaagagaagctgcatatatatgagtctgtctagacctcaggaaaaaaaattgcagttttatgtgagcacataaatacttccagggtcttcatctgccaggatcagtgcagaaaagtggctttaaaaactcacctccctgtttctccctggaaggggtttatgccatgcatcaagtacgccaacttttacagttacctcccgaaggactccatcctaaacctcttagttctaggagcagaaagaactaggcatttattaatctccctagatcacagaacaaagagatggttttaaatgggcacacaaacacttccaggagctaacacccctttggagcagtgcagaaaaggggcaggaacatgcagctccgatttttctctttagaagggtctcatggcacataattccagtggctgctttatggcttggcttatattgaacttgtttcagggagctaatggagcaaacaaacaataaccatttagcagcctgagccagagctcagcacttcatgagcctttcctttggctcaccacagtgataagtccaagtgtacccattcttcctggaaggcatttggccacacattaagtgccacaacttctatagctcccacccaagagactatctccttaataacctaattctgggaaaatggggctttgcattcctgagtggccctagatcacagaaagccaagaggtagacatacaacgtttgcaacagatcctcttccccagcttaatgcagcgacagtgggatataaatgcccatgttcagctttatcatgaagatacaatgaactggagcatgcatccaacacttttaacatttgcagctacataacaagagtctggctcctaagttgtcagtttcagagtatggagaggacatggcacatcttaagctccaggaggccacccaaaacagagacagcagtctggacaaacacaaagatttgagaggcaccttagaatctctggatggatgaattggtgagatccttctacacaaggccaacctgacaagattgggagaaataattgtctgatctcatatgcagaaatgaaccacagagcatcaaggaaaataaataggagtatatttcaaacaaaagaataagataaatgtccagaaaccagcccaagtgaagtgtaggtatgtgatcatccaacaaggaattcaaaataatgttcataaagatgctcactgaggtcgggagagcaatgaaagaataaactgagaatttcaacaaagaaacagaaagtatacataagtaccaaacaaatcatagagctgaagaatactctaaactgaaaatttcaataaaaggattcagcagcagactagatcaagcagaagaaaggattactgaaatcaaaaacaggtcactgaaaattatataatctgaggtacaaaaagaaaagaaattttaaaaagagggtaaggccaggtgcagtgcctcacacctataatcccagcactttgggaggccaaggtgggcagatcatgaggtcaggagtttgagacctatctggccaacatagcgaaaccccgtctctactaaaaataaaaaaaaattagctgggtgtggtggcgggcgcctgtaatcccagctacttgggaggctgaggcaggagaatcgcttgaacccaggaggcagaggttgcagtgagccaagatcacgccattgcactccagcccaggcaacagtgcatgactccatctcaaatgaaaaaagagtttagtctggaagttctagccaaagcaatcaggcaagagaaagaaaacgcatccaaataggaagagaggaagtcaaactatctctatttacagatgttataattctatacctaggaaactccataacctctttccaaaagttcctagatctgataaacaacttcagcaaagtttcaggatacaaaaatcgatgtaaaaaatcagtagcatttttatacaccaacaacattcaagctgagccaaattaagaacgtaattccattcacaatagccacaaaaagaataaagtatctaggaataaaactaaccagagaggtaaaagatctctacaaggagaattacaaaactgctaaaataaatcagagattacacaaacaaatggaaaaacattccatgttcatggctaggaagaatgaagaatcaatattgttaaaatgaccatacaactcaaagcaatttacagattcattgctattcctattaaattaccaatgacatttctcacagaattaaaaacttttttaaattgatatggaattaaaaaaaagcctgaatagccaaagcagtcctaagcaaaaagaacaaagctggaggcatgacattacctgacttcaaactatactacaaggctacagtaaccaaaacagcatggtacggatacaaaaaatagacacatagaccaaaggaacagaatacagagcccagaaataaagcttcatacctacaacaatctcatttacaacaaagttgacaaaaacaagcaatggggaaaagactccctgttcaataaatggtgctgggataactggctagccatatgcagattgaaactggaccccttcctcatgccatatacaaaaattaactcaagatggattaaggacttaaatgtaaaacctaaaattataaaaactctggaagattttcaaataacttaaaaaagaactacttggacataggccctgacaaagatttcatgacaaagacaccaaaagcaatttgcaacaaaagcaaaaattgacgaatgtgatctaattaaagagcttctgcacagaaaaactctcaacagaataaacaggcaagccacagaatgggagaaaatatttgcaaactatgcatctgacaaaggtctgataaccagaatctgtaaggaacttaaattcacaagcaaaaaaacaactctgttaaaaagtgggcaaaagacatgaacagacacttttcaaaagaggacatacagcaaacaagcacatgaaaaaatgttcaacatcactaatcactggagaaatacaaatgaaaaccacagcaagatactatctgagaccactcagaatagctgttattaaagtcaaaaaaatattgggaggctgaggcagcaagatcacttgagcccaggaattcaagaccagcctgggcagcatagcaagaccccatcttgacaaaaaaaataaaataaaaattacccagacatggtgacatgtgcctgttgtccaagctatttgggaggctgaggtaagattgcttgggcccaggaaatcaaggctgcagtgagctgattgtaccacagttctcccacgtgggtgacaggaaaagaccctgtctcaaaatagtaaaaattaaaattaaaaaattaaaagtcaagtctcaaaatagtaaaaattaaaattaaaaaattaaaagtcaaaaaataacaaatgctggtgaggttgcagagaagagggaacacttatacactgctaatgggaatgtaaattagtccagccattatggaaagcagttctgtgatttctcaacttaaaaaagaactaccattcaacccagcaatcccattgctggatatataaccaaaggaaaataaataattctaccataaagacacatgcacatgtatgtgttcatcacagaactattcacaatagcaaagacatggaatcaacctaaatgcccatcagtggtagactagataaagaaagtgtgctacatatacacgttggaatactacacagccattttaaaagaacgagatcatgtcctttgcagcaacatggatggggctggaggccattgtcctaagtgaactaacacagaaaaccaaataccacatgttctcacttgtaagtggaagctaaacattgagtactcatggacataagaagagaacaacaggcaggctcagtggctcatgcctatgatcccagcactttgggaggctgatgcagggggatcatttgtggtcaggagttcgagaccagcctggtcaacatggtgaaaccccgtctctactaaaaatacaaaaatgagtcgggcatggcggcacatgcctgtaatcccagctactcaggaggctgaggcaggagagtcacttgaacctaggaggcagaggttgcagtgagccaagatcgtagcactgccctccagcctaggtgacaaagtgagactccgtctcaaaaaaaaaaaaaaaaaaaaattaagagaacaacagacatcagggcctatctaagagtggagggtgggaggagggtgaggatcaaaaaactacctatcaggtactgtgcttattgctggggcagtataataatctggacaccaaacctccatgatgctcaatttacctatataacaaacctgcacatgtacccctgaacctaaaataaaaaaagaaaaaagctaacataaaggcttttaaataccttttactcagagtaacaagtgacaaaaactcacttagaatgagggaggccattagtcaatggcctagttttcctgaaaatgagtttgaaagaaaaggagcagaggaaatggtcctgaagaaagaaactgagagcttgaaaggcagtatgcctctctgactgcaggtaaaggctactcataagccaacagattttattttttatttcctaagctgaaacagcctagcctaggagaggggtgtttgtgtgggtgtgtgtgtgtgtgtgggtgtgtgtgtgtgtgtgtgtgtgcccatgtgtgtgtatttaaagtaaatcggtggaggaagtaaagagacagaggaaagggagtagcctgggggaagagagatgagagacttgagtataaatgacttaggacaggagtgacaaaatagagaaacagctctaggttatttaaaaaaagaacgtatataccatggaattctacacagccataaaaaagaatgagattatgttttctgcagcaacatggatggagctagaggccattatcctaagcaaactaatgcaggaacagcaaaccaaatgctgcatgttctcacttataagtgggagctgtacatggacacaaagaagggaaccacagatactagggcctatttgaaggtggagggtaggaggaggggaattaaagtatagagtttctttatgcaatcaaagttgttatcagcctaaaatgctattagtataagatgttttatgtaagccactgagtaactactaagcaaaagcctgtaattaatatacaaaagataaaagaatcaaagcataccactagacagccatccagccacaaaggaagaaagcaatacaggaagaaaagaacaaaggatctacaaacaaccaaccagaaaacaaaacagcactagtaaataagtccttgcctatcggtaattactttgaatgtaaatagattaaattctccaatcaaaagacgtggagttcctgaatggattttttttttttaagacccaactatatgctgcctacagtagcctcacttcaccttaaaggacagtcatacactgaaagtgaagggatgaaaaaagaaactaccatcagagtgaacaggcaacctacagaatgggagaacatttttgcaatctactcatctgacaaagggctaatatccagaatctacaaagaactcaaacaaatttacaagaaaaaaacaaccccatcaaaaagtgggcgaaggatatgaacagacacttctcaaaagaagacatttatgcagccaacagacacatgaaaaaatgctcatcatcactggccatcagagaaatgcaaatcaaaaccacaatgagatatcatctcacaccagttagaatggcgatcattaaaaagtcaggaaacaacaggtgctggagaggatgtggagaaataggaacacttttacactgttggtgggactgtaaactggttcaaccattgtggaagacagtgtggcaattcctcagggatctagaactagaaataccatttgacgcagccatcccattactgggtatatacccagaggaatataaatcatgctgctataaaggcacatgcacatgtatgtttattgcggcactactcacaatagcaaagacttggaaccaacgcagatgtccaacaatgatagactggattaagaaaatgtggcacatatacaccatggaatactatgcagccataaaaaatgatgagttcatgtcctttgtagggacatggatgaagctggaaaccatcattctcagcaaactatcgcaaggacagaaatccaaacaccacatgttctcactcataggtgggaattgaacaatgagaacacctggacacaggaaggggagcatcacacaccggggcctgttgtggggttgggggagaggggagggatagcattaggagatatacctagtgtaaatgacgagttaatgggtgcagcacaccaacatggcacatgtatatatatgtaacaaacctgcatgttgtgcatatgtaccctagaacttaaagtataatatatatataaaagaaaaaagacatttcatgcaaatggaaacaaaaagagcaggggtagctatactatttcagacaaagttgactttaggtcaaaaattataaaaagagacagtgggctgggcacggtggctcatgcctgtaatcccagcactgtaggaggccaaggtaggtggatcacaaggtcaggagttcaagaccagcctggtcaagatgtgaaaccctgtctctactaaaaatacaaaaattagccaggcgtggtggcgggcacctgtaatcccaggtacttgggaggctgaggcagagaattgtttgaacccgggaggtggaggttgcagtaagccaagatcgtgccactgcactccagcctgggcaacaagagtgaaactctatctcaaaaataaaaataacaaaaataatatctggagataaaaatggaaacatatcaaatcttacagaatgtagcaaaagcagctctgggagggaagtttatagcaataaatgcctacatcaaataagaagcaagatctcaaacaacccaatgtcacacctcaaggaactagtaaaataagaaaaaactaaccccaaagttaacagaaggaaagaaataagaaatatcagagtagaagtaaatgaaatggacactaaaaaaagaaaaagaaaagaaaaatcacctaaacaagtttattttctgaaaagcaaaacagaagagtcaagtcagaaatgaaatagaagacgttacaactgataacagaaatataaaggatcataagagactgctacaaataattatatgccggcagattggacaacataggagaaaatgataaattcctagacacgtgtatctactaagacttaatcatgaagagattggaaatctgaacagactaataactagtaaagagcttgaatcagtaattaagagtcttccatcaaagaaaagcccaggactagatggcttcacagttgaattctgccagacatttacagacaaactaataataatccttcccaaacttttcttaaaaattgaagaggagggaatatttccaaactcatttcatggggctagcattaccctgatactaaagccagacaaagacactacaagaaaaggaagctataggtcagtaacatggattaatatgatgcaaaagtcctcaacaaaagactagcaaactatattcaacagtacattaaaaggattattcaccatgatcaagtgggatttatcgctggaatacaaggttggttcaacatactcagatcaataaatgtgattcaccatattaacagaatgaaggagaaaaacatgatcatctcaataaatgcaggcaaagcatataaaaaattctcatttcttgattttaaaattcccaacaaattacatatagaaagaatgttcttcaaaacaataaatatcatatatgataagcccatagttaacttcacactcaacagtgaaaaactgaaagcattttttttaagatcaggaacaagacagggatgcccactctgactacttctgttcaacacaatactaagtacttctgtaataaatacttctgtcctagccagagcagttaggcaagagaaagaaaaggcatccaaataggaaatgatggagtagaattgtctctgtttgccaatgacatggtcatatatatagaaaatttcaaagactctacaaaaaaaacctgttagaactgaaaaacagattcagtaaaattgcaggagacaacacctaattagttgtgtttctatacaataacaacaaactgtctaaaaaagaaattatgaaaacaagccaggtgtggtggctcacacttgtaataccagcactttgggaggctgagatgggaggatcgcttgagcccaggagtttgagaccagcctgggcaacatagtgagacctcctctctacaaaaataaagaagttacaaaaaccatcctgtttacaatagtatttttaaaaaacaaaatacttaggggttaaaaaattttttttcttgagacagggcctccctctgtctcccagactggagtgcagtagcacaatcttggctcagtgcaacctccacctcccaggttctagagattctcccacctcagcctcctgagtagctgggtttacaggtgcatgccaccacacccagctaatttttttgtattttttggtagagatggggttttaccatgttggccaggtttcaggggtacatttaaccaaggaagttaaagatctgcatgtatactgacaactataaaatattgattaaggaaattaaagattatgcaaataaatggacagatatctcatgtttatggattggaaggattaatattgttaagatgtttataatccctaaagcaatctacagattcaatgcaatctccatcaaaattccaatgtcattcctcacagaaatagaaaaaaacaatcctaaaatgtgtatggaataaaaaaagaccccaaatagccaaagcaaccttgaccaaaaagaacaaagctggaggcatcactctaccatatttcaaagcatattacaaaactgtagtgatcaaaacaccatggtattggcataaaaacagacacattgaccaatagaagaggatagtgagcccagaaataaacccacacatctaccattaattgatttttgacaaagatgccaagaacacacaatgaaaaaaggagagtctcatcaataagtgatgttaggaaaattggataaaccatatacagaagaatgaaagtagacctttatctcacccccctatagaagaatcaactgaaaatggattgaagacctgaaatgataaagctactagaagaaaacataggggaaaacctatgatgttgatctaggtagggatttcttggatatgatccctaaagcactggcaatgaaaataaaaatagaaaatgggattgcatcaaactaaaaagcttcttcacagtgaagaaaacaatagaatgaagagaacacctacagattgggagaaaatatttgcaaattacatgtcagataagggactaatatccaaaatatacaaggaacctcaagctactcaataacaagactacaaataaccctatttttaaaattggcaaaggacttgagtagacatttcttaaaagaagacatcagatatatgaaaaaatgctcaatatttctagtcatcagaaaacaccaagtaaaaccacagtgagatatcacgtcacatttgttagataagctataatcaaaaagatgaaagataactgttggtgaggatatggagaaaagggaactcttgtacactgttagtgatattgtaaatacagccattttggaaaacagtatgaagttttctcaaactaaaaatagaattaccatataatccaacaattccacttctgggtatatacccagaggaattaaactcagtatgtcaaagagatatgtacactcccatgttcattgcagtgttattcacaatagcagagacatggaaaaaacctaagtgtctatcagcagatgaatagatttttaacatgtggtatatatacacaggcaatactattcagccttaaaagaagtaggaaattttgtcatttccagcaacatggatgaacctggaggacattatgttaagtgaagtaaaccaggaacagacaaatatcatatgatctcacttacgtgtagaatctaaaaaaaattgaactcgaggctgggcgcagtagctcaagcctgtaattccagcactttgggaggccaaggcaggcggatcacgaggtcaggagatcgagaccatcctggctaacatggtgaaacccagtatctactaaaaatacaaaaaaatagccaggcgtggtggcaggtacctgtagtcccagctactggggaggctgaggcaggaagatggcgtgaacccgggaggcggagcttgcagtgagccaagatcgcgccactgcactccagcctgggcgacagagagagactctatctcaaaaaaaaaaaaaaaaaaaaaaaaaaaaattgaactcgaaaagtagatagtagaatgatggttaccagaggctgggggtgggggcagtagatagagaaaggggagacattggtcagtgggtgcaaagtttcagttcaggtgttctgttgcacagcatggtgacaatagttaataatggagtgtatatttcaaaatagctaaaacagtattttcagtgttctcaccacaaaaaaatgataaatatctgaggtgatgaatatgctaattagcccaatttgttcattccacaatgtatacatgtattgacacatcagattgtgtttaataattatatacaattattatttgtcaattaaaataaaaattttttaaatcggtgtaatacacccttaaatggtataaaggacaaaaccacatgatcatctcagttaatgtcttagtccattttgtgtttctataaaggaatacctgaggctgattagtttataaagaaaaagggtttatttggcttacaattctaatgtctgaaaaagtttaagattgggtctctggcgaaggcctcaggctgcttccactcatggcagaaggtgaaggagagccagtgtgtgcagagatatcatggtgagagagaaatcaagaaagagggggaaggtgccaggctctgtttaacaaccagctgtcatgggaactaatagagcgagagctcacttttccccaagggaaggcatttatctattcttcatggatccacccctatggcccaaacacctcccattatgttctacctccaacattggggatgagatttcaacatgaggttttgaggggacatatccaaaccattgcaaatgtagaaaaagcattaaaaaaaatccgccaacaatttggtatttgttttgtaataaaatcactgagcaaactaaaaatagaagcaaacttcttcaaccttataaagggcatctatgaaaaacacacacctaacatcatacttcataacaaaagattaatttctttctcctaagatcaggaacaagggcaagatgtgtgctctagccatttttatttattatactggagagtctagctggggcaataaggcgttggggggtggggggtaacccttcagattagaaaggaagaagtgaaactatctctattcacagatgacctgattctttttttaggaggtgaggtattctgtcctccaggctggagtacactggcacgatcatagctcactgcagcttcaaactcctgggctcaagtgatccttctgcctcagcctcccaagtagctggaactacaggcactgacaactatgcctggctaactttttaaattttttttaagagatggagtctcactatgttgctcaagctaacttgattttatatacagaaaattctaaggcatccacaggaaaattatcaaaagttacaaacaagttcaagatttcaggacataagatcaatatccaaaaatctatagttctatacaccagcaataaatgattcaaaaactgaaattaagaaaaaatcccagttacagtatcatcaaaatgaataaaaaagaacttccagctgcatttttgcagagattgacagtctgagccttcaattcatgtagaaatattggggactcagccaaaacaacctggaaaaagaacaaaattgaaagattcacagttcccattttcaaaacttactacaaagtaacagtaatcaagatttgtactaacataaagatagatacatagatcaacaaaactggagagtccaaaaataaactcttacttaaattggtttttttttttttttgagatggagtcttgctctgttgcctgggctggagtgcagtggcgcgatctcggctcactgcaagctctgcctcctgggttcaccccattctcctgcctcagcctcttgagtagctgggactacaggtgcccgccaccatgcccggctatttttttgtatttttagtagagatggggtttcactgtgttagccaggatggtctcgatctcctgaccttgtgatccgcccgccttggcctccncaaagtaaattgattttttataatactgccaagataattcagtaaggaaagaagtgtcttttcaacaaatggttctgggacaacttaatatccacatgtagggccaggtgcagtggctcaacacctgtaatcccagcactttgggcgtctgaggcaggcagatcacctgaggtcaggagttcgagaccaccctggccaacatggggaaacccgtctttactaaaaatttaaaaattagccaggcatggtggcgggcacttgtaatcccagctactcaggaggctgaggcatgagaatcgcttgaatccaggaggcagaggttgcagtgagctgagatcgtgccactgcactccagcctgggggatagagtgagactctgtctcaaaaaaaaaaaaaaaaaaaaaaatctacatgtaaaagaatgatatcgcatctctaccttatagtatttacaaaattaacttggaatggattttagacctaaatgtaaaagctaaaactatgaaactcttggaagaaaatgtagtatatcttgttgtgttaagcagtagtttcgtagatataacaccaaagtgcaaacaacaaaagaaaaaaataggtaagttagacttcatcacacaaagttaaaaatttttgtgcttcaaaggctaccatcaagataacccacagaatgggagagaatatttgcaaatcatacatctagtaaacaccttgtggtctagaatatattcaaaaagacacctactactcaaagatagaaaactcaatttaaaaatgggcaaaagatttgaatagacatttccccagagaagacagacacatagccaatatgcacaagaaaagatactccacattattactcattaaggaaatgtaaattaaatctacaagatagcacttcacactgagagtagacataacaggccaggcatggtagctcatacctgtaatcctagcactttgggaggtcaagtcaggaggcattaagtcaggagttggagacaagcctgggcaatagagcaagaccctgtctttacaaaaataataataataataataatttttttttaattagttgagtgtagtggtgcatgcctgtagtcccagtttagtcccagctaaatttgttgagactttctttattcaagagactgaggcaggaggatcccttgagttcaggagtcgatgctacagtgaactatgattgtgccactgcagtccagcctgggcaacagagtgagaccccatctcaaaaacaaaaaaagagtagatataatgaagaagacaaatattggtattaattctttaaacatttcatagattttattagtgaaaccatcttgtcctagaattttctttgtgaaaacctttttaattattggatctttcacttgtgaataggtatactcagattttctatttcttcatgaatgaactttggtagcttgtaacttcctaagaatttgtcagtttcatctaggttatataatttgttggcatgcatttgttcatactagaaccatgtaatcctttctgattttataacattggtaatgatgtcacttcttttgttcctaatttgactaatttgagttctctttttctttcttggtcaatgcagctaaaagtttgtccatcttgttgatcttttcagagaaccaattttttaaattttaattttgattttaagttctagggtatatgtgcaggatgtgcatgtttgttacataggtaaatgtgtgccatggtggtttcctgcacctatcaacccattacataggtattaagcccagcacgcattagctatttttcgtaatgctctccctccccccacctcaatccccaacgccccagtctatgttgttttcctccctgtgtccatgtgatctcattgttcagcacccacttataagtgagaacatacagtatttggttttctgttcctgtgttagtttgctgaggataatggcttccagctccatccatgtccctgcaaaggacatgatttcattcctttttatggctgcatagtattccatggtgtatatgtaacccattttctttatccagtgtattgttgataggcatttatgttgattccatgtctttgctattgtgaacagtgctgcaatgaacatacaagtgcatgtatctttgtaatatgtaatagaatgatttataatcctttgggtatatacccagtaataggattgctgggccaaatggtatttttgcttctaggtctttgaggaatcaccacactgtcttccacaatggttgaactaatttacattcccaccaaccgtgtaaaagcattcccatttctccacagcctcaccagcatctgttgtttcttgacatttttaataattgtcattctgactggtgtgagatgctgtatcattgtggttttcatttgcatttctctaatgatcagtgatgttcagctttttttcacgtgtttatgggccgcgtaagtgtcttcttttgagaagtgtctgttcatctcctttgcccactttttaatgggttttttttttcttgtaagtttgtttaagttatttgtagattctggatattagacctttgtcagatggatagattgcagaaattttctcccattctatagattatctgtttactctgatgttagtttcttttgctgtgcagaagctctttagtttaattagatcccatttgtcaatttctgcttttgatgaaattgcttttgatgtttttatcataaaatctttgctggtgcctatgtcctgaatgatattgcctagattttcttctagggtttttgtagttttgggtttgacatttaagtctttgatccatcttcaattaatttttatataaagtgtaaggaaggtgtccagcttcaattttctgcatatggctagccagtttacccagcaccatttattaaatagggaatcctttccctgttgcttttgtcaagtttgttgaagatcagatggttgtagatatgcagtcttatttctgagatcgctattctgtttcattggtctatgtgtttgttttggtaccactaccatgttgttttggttactgtagccttgtagtattgtttgaagtcaggtagtgtgatgcatacagttttgttctttttgcttaggattatcttggctatacgggctcttttttggttccatatgacttttaaagtagttttttctaattctgtgaagaatgtcaatggtagtttaatgggaatagcattgaatctataaattactttgggcagtatggccattttcacaatattgattcttcctatccatgagcatgggatgtttttccatttgtttgtgtcctctctgatttccttgagcagtggtttgtagttcttcttgaagaagtccttacttcccttgttagctgtatgcctagatattttattctctttgtagcagttgtgaatgggagttcattcatgatttggctctctccttgggtgtatatgaatgcttgtgatttttgcgcattgattttgtatcctgagactttgctgaagttgcttatcagcttaatgagcttttagactgagacaatggggttttctagatatagaatcatgtcatctgcaaacagagacagtttgacttcacttcctatttgaataccctttatttgtttctcttgcctgattgccctggccagaacttccagtactatgttgaataggagtggtgagagaaggcatccttgtcttgtgccggttttcaaggggaatgcttccagcttttgcccattcagtatgatattggctgtgggtttgtcgtaaatgccacttattattttgcaatgtgttccatcaatacctagtttattgagagttttttatcatgaaaggatgttgaattttatcaaaggtcttttctacatctattgagataatcatgttgtttttatcttttgctctgtttatgtgctgaattacctttattgatttgtgtatgttgaaccagccttgcatcccagggatgaagccaacctgatcatggtagataagctatttgatgtgctggtggatttggtttgccagtattttattgaggacttttgcaccaatgttcatcagggatattggcctgaagttttctttttcttattgtatctctaccaggttttagtatcaggatgatgctggcctcataaaatgagttagggagaagtccatccttttcagttgcttggagtaatttcagaagaaatggtaccagctcctctttatacctctggtagaattcagctgtgaatccatctggtcctgggcttttttggttagtaggctgtttattactgcctcagtttcagagctttttattgttctgttcagggattcaacttcttcctggtttagtcttgggaggctgtacgtgtccaggaatttatccatttcttctagattttctaatttacatgcctaaaggtgttaatagtattttctgatggttgtttgtatttctgcaggatcagtggtgatatcccctttgtcatttttattgtgtctatttgattcttctctcttttcttctttattaatctagctagcagtccatttatgttattaattttttcaaaaagccagatcctggattcattgatttttttttttgaaggctttttcatgtctctatctcctttagttctgctctcatcttggatatttcctgtcttctgctagcttttgggtttgtttgctcttggttctctagttcttttagttgtgatattagaaagatttatttgagatctttctagctttttgatgtgggcatttagtgctataaatttccctcttaacactcttttagctgcatcccagagattctggtacattatttctttgttcccattggtttcaaataacttcttgattttggttttaaataacttcttgatttctgccttactttcattatttacccaggagtcactcaggagcaggttgttcaatttcagtgtagttgtgtggtttttagtgagtttcttaatcttgagttctaattgatagcactgtgttctgagatcctgtttgttattatttcatttcttttgcattcactgaggagtgttttacttccaattatgttatcaattttagagtaagtgccatgtggtgccaagaagaatgtatattctgttgtttttgggtggagagttctgtagataccaggtccatgtgatccagagcagagttcaaatcctgtgaatatccttattaattttctgtctcagtgatctgtctaatattgacagtggagtgttaaagtctcccactattattgtgtgtgggagtctaagtctctctataggtctttaacaacttgttttatcaatctgggtgcttctgtattggatgcatatatatttaggatagcccttcttgttgcattgatccctttaccactgtgtaatgcccttctttatctttttttgtctttgttggtttaaagtctgttttgtcagaaactaggattgcaacccctgcttttttctgctttccatttgctcggtaaatttttctccatccctttattttgagcctacgtgtatctttgcacatgagatgggtctctcgaatacagcacaccaatgggtcttgactctttatacagtttgccattctgtgtcttttaattagggcatttagcctatttacatttatggttaatattgttatgtgtgaatttgattctgttatgatgctagctgattattttgcagacttgttgatgtagttgcttcatagtgtcattggcctttgtacttttttttttgcagtgactagtaatgttttcctttccatatttggtgcttccttcaggagttcttgcaaggcaggcctggtggtgacaaattccctcctcatttggttgtctgaaaaggattttatttctccttcacttatgaagcttcgtttggccagatatgaaactctgggctggaaattcttttctttaagaatgttgaatattggcccccaatctcttctggcttatagggtttctgctgaaaggtctgctgttagtctgatgggcttccctttgtaggtgacctggcctttctgtctggctgcccttaacattttttccttcatttcaaccttggagaatctgatgattatgtgtcttggggttgatcttcttgtggagtatcttactggggttctctggatttcctgaatttgaatgttggcctctcttattaggttggggaagttctcctgggtgatatcctgaagtatgtttttcatcttggttctgttctccctgtctcattcaggtacccccatcagtcgtaggttcagtctttttacatattctcatagcttttgtttgttccttttcatttttttttttctctaatcttgtcttgccttatttcagcaagatagtcttcaagctctgaaattattttctctgcttggtctgttcggttattgatacttgtgtttacactgtgaagttctcatgttgtattttcagctctgtgaggtaatttatgttcctctctaaactggctcttctggttaacagctcctgtaatgttttatcatggttcttagcttctttgcattgagttagaacatgctcctttagctcagagaagtttgttattacgcaccttctgaagcctacttctgtcaattcattcatctcagcctctgcccagttctttgcccttgctggagaggtattgcaatcatttggaggagaagagacattctgcctttttgagttttcagtgttttttcactgattctttctcatcttcatgagtttgtctagcgtcaatctttgaggctgctgacctttggatagggtttttgtggggacttttttgttgatgctgttgttgttgctttctgtttgtttttctttcaacaattaagcccctttttgtagggctgctctggtttgccgagggttcactccagaccctattcacctgggtccctcccacacccagaggtgtcacctgaggaggctacagaacagcaaagatagctgcctgcttcttcctctgagatctctgtccctgagaggcactgacctgatgccagcaggaatgctcctatataaggtgtctggcaacccttattggagggtctgacccagtcagggggcacggaatctgggacccacttaatgaagcactctggctgccccttggcagagggggtgtgctgtgctggggggaatcccacttgtctgggctgcctggattcctcagagctagcagggggaaagactaagtctgctgatctgcggacaccatagccgcaggtctccgcagcccctcagtcccagggagatcaaagttctgtccctaaacccctggctgaagttgctaaaattcctgcagggaggccccacccactgaagaagaatgggtcagggtccgacctaaagtggcagcctggccacagtctgccacagccagtgtggcagtttggatccaaaccgtccagtttccccagcaccagcaggggaaaaactgaagactggagctacagtgatggctgctgcccctctcccagtgagctaatcatcttaggcagcaggcagccatagtgatgcctgctgcccctctcctgggaagctcattagtcttaggcagcaggcagctatagtgatgatgacctcccctcccgctcaggatgatgacctcccctccccctcctcccctgctcagttgtcatagacagcaggcagctgcagtgatggctgccaaccctcacttggggggaactcagttgtcttagcctccagctgagtggccgctgagaatctgcacagctgtgtgcttgggatccaaggtcctggtggcgtaggcccacaagtaggatctcctgatctatgggttgcacagatctgtggaaaaagcatggtttcccagtctgggtagcacgatccctcactgcctcccttggctggtggtggggggcccccttaccccatgtggctcccaggtgagccatcgcaccaccctgcttttcctcactttccgtgggtcatgccaaccacctagtcagtcccagtgagagaacctagataccttggttgccactgcagggttcactcaccgttttggttcttctctgtgggaccctccaactgcagctgtttctagctggccatcctcacccctctgattttacttcttttaaatttattgggactttcttatggcctaacatatgatctgtcctagagaagggaatgcacatatttttccttctatgtgcatttgaggaaaacgtgtgtattttgttgttagatggagtgttctatagacgtgtgttagagctagatagtttataatattgctcaagttttttatttctttgctgatcttctgtctagttgttctgactgttagtggtatatcaaagtcttcaactattattgaattgtctactattactttccattctgtcagtttttgcattatatattttgaggctgtgcttttaggttgcatatatgtttataattacgacttccagacataactgacccctttatcattataaaaatatccttctttgtctctaacaaaaatttttgtcttaatgtctatattgtctgatgttaatatagccataccagttctcgtttgggtactattttcatggtatatatttttccattcttttactttcaatgtatttgtacatttgaatctaaagtgtgtaccttgtagatatagttggatcatatttttaaattaatttttcccaactccgtcttttagttggagtgtttaattcatttatgtttactgtaactgccaataaaggtaattggtaggttttacacctgccattttgctatgtgctttatataggtcttatgccaactttgttcctttgttcctccattactgccttcttttgtgttaaatgtatttagtatgccattttaattccctcagtgtgtgtgtgtctgtgtgtgtgtgtgtgcgcgtgtgtgtgtgtgtgtgtgtgtgtgtttttattatagggcaggtctacaaatagaaaattctctctgtttttatctgagaatgtcttgatttcttcttcttttttttttttttttttttttgagacagggtcttgccccgtcacacaggctggggtgctgtggcacaatcatagctcactgccaccacagtcttcccaggctcaagcgattctcccacctcagcctcccaagtcattgggactacatgtgcacaccaccacaccagctagtttttctttttttttttctttttttttttaaatttattgttgtagagatggggtctcgctatgttgctcaggctagtatcaagttcctgggctcaagcaatcctcccatctcagcctctcaaagtgctaggattacagacatgagccactgtgctttgcagtttctttagttttgaatggtagttttgctggctgtaggattctttgttgatggtctttcatttcagactttgaatatttctgctgtctgccttctggcctccactatatctgatgatgtcaccttttcatattattgagggttgtttgttgtttttctcttgttgctttcaagattctctttatttttggcttttgacacttttgattctaatgtggctctatgcgaatctctttgattttatcccctgtagagtttgttgagcttcttggctgtgtaaagattttttcatcaattttggaaagtttttgcccattatttcttcccatttctctttctcttttccttctggcactaccactgtgtgtgtgtttatacccttaatgatgccccacaggtatctgaggctctgttcatttgtcttcattcttttttctttttgtttttcctacttgagataatctcagttaacttggcttcaaatttgctgattcttctgctagctcagatctgctgctgagcccctttagtgaatttttcatttcagttattgtattcttcaatcctagaatttatattcggtgtactttaagtaatttctaccctttttgttggcatcctctatttggtgagtcattgttcttacactttcctttaattctttaagtgtgatttccttcatttctttgtttaaagtattttccaagcaagtccaatgtttgagctacctcaggaaaagtttttatttacttctttttgcccgtgtatgggccatactttcctatttttttatatcttataatattttgttgaaaactggacattttaattaatttggcaactctggaaatcagatcccttccccacatccccagggcttgttattgttgctttttattgctttatgttgttgatgatgcttgtttctttttttagtgacattattggactcattgctttttggggtttttttagacagggtcttgctgtattgctcaggctgtagtacagtgatgtgatcagagctcactacaaccttgcctggactcaagaaatcctcccacttcaacctgctgagtagcttggattacaggcatgcaccaccacatgcagctaattttttaattttttgtaaagatggggatcttgctatgtttcccaagctggttccaaactcctggcctcaagtgatcctgttgcctcagcctcccaaagcactaggattacagatgtgagccaccatgcctggacccattctttaatatctgtattttttaactatatgcagtcactaaagtctccatgcagttagttaatgatcagctaataactgaacagatattttcttaaatgccttaaatcaataactctccgcattttgtaaagtgttttttttatgtgtatgtgttggggctcactgtcattgctccagcacttttcagttcagccatagccttcacttcctgcttgcccagagcctcaaggtcagcacaggtgagagattaggccttctcaggccttccctaggaatgtgcacagccctgcactcatgtgtggccttctagattcccaggaatatgtcagagcttttcaaggccccctatggatatttcattcctcagattttccttataattttttttttttagccattctctggtttgcccgaaatgacatggctgcttcatgcagctgggatgttaaattatatgggtttttttttttgttttttttttctctccaacaaatgccttgggtatagagttttcctcactgagtgagctctgagtcaggttaaattaagacaagccctatgaatggagtttttccaggaagctgccaagcaggtcaaataataacaattctggggggtcaggactttttgtaggagttccaaaaccattctgtcccttctaatggctgctaggctctggttttcatgactttcatgattctacagcagcttgtttttaaggctactgtggaggtgggaggggaagggaatagtgcaagttaaaaatgcaacaaaactcattgttattattcatccatttttctttttttttttttttattgatcattcttgggtgtttctcgcagagggggatttggcagggtcataggacaatagtggagggaaggtcagcagataaacaagtgaacaaaggtctctggttttcctaggcagaggaccctgcggccttccgcagtgtttgtgtccctgagtacttgagattagggagtggtgatgactcttaacgagcatgctgccttcaagcatctgtttaacaaagcacatcttgcaccgcccttaatccatttaaccctgagtggacacagcacatgtttcagagagcacagggttgggggtaaggtcatagatcaacaggatcccaaggcagaagaatttttcttagtacagaacaaaatgaaaagtctcccacgtctacttctttctacacagacacagcaaccatcccatttctcaatcttttccccacctttcccccttttctattccacaaaaccgccattgtcatcatggcccgttctcaatgagctgttgggtacacctcccagacggggtggtggccgggcagaggggctcctcacttcccagtaggggcagctgccgggcggaggggctcctcacttctcagacggggcggctgccgggcggaggggctcctcacttctcagacggggcggctgccgggcggagggtctcctcacttctcagacggggcggccgggcagagacgctcctcacctcccagacggggtcgcggccgggcagaggtgctcctcacatcccagacggggcggcggggcagaggcgctccccacatctcagacgatgggtggccgggcagagacgcttctcacttcctagatgggatggcgggcgggcagagacgctcctcactttccagactgcgcagccaggcagaggggctcctcacatcccagacaatgggcagccaggcagagacgctcctcacttcccagacggggtggcggccgggcagaggctgcaatctcggcactttgggaggccaaggcaggcagctgggaggtagaggttgtagcaagccgagatcacgccactgcactccagcctgggcaccattgagcactgagtgaacgagactccgtctgcaatcccggcacctcaggaggccgaggctggcggatcacttgcggttaggagctggagaccagcccggccaacccagcgaaaccccgtctccaccaaaaaaatacgaaaaccagtcaggcgtggcggcgcgcgcctgcaatcgcaggcactcggcaggctgaggcaggagaatcaggcagggaggttgcagtgagccgagatggcagcagtacagtccagcttcggctcggcatcagagggagaccatggaaagagagggagagggagaccgtggggagagggagagggagagggagagcgagagcgagagcgagagcgagagcgagagctctttgtttcttacagagcgtacatgggactcatccatttttcttgagtaaacatttcttggattgtcacaagcctttggttaaccagtattagccaccccattgctttcatggacaagcagattttcagaggtctttactctgccattcctaaagtacctctcccatcatcgtgttcttaatatccaaaaaagcatgttcttacaatcaaacgctcaggggccatgccccagaaaatgaagcccatggactcagtcggacaccagtttggctagaccttagtctgtcccatgctttgggctttgtgggtataaagtgggtatagagctgctttgggcactgtgggtatagagctacctctgttctgcccagtttgggtctgcttccatctggcctgtgagagtacccagaactcactctcatgtagccctctaagagagaaacaactcacagagagaaccagatctaactcactggtcccacccattgtcatgatctagtggcggccaggagtggcctattgaggagatgcatattgtggtggtggtgtctcacatcagctttcctctgctgtcaggaatttctgctgaagattttttgcgtgttccggaacctgatgaagatgagtgtcttccctcgggactggatggtaatgagactgctcacaagcaagtaagtatggaagggctctgtatcagcatcactgagctgttctcagactaagaagagtatgtgtatttcagagagggagcacatgagcaagacaaataaaggccagggccatgggaacagagaggagagggcaaatgagaaaaacatttttgtgcttagtagatgatggcacagtaaggatagagaagaaaattttcaggatgtgaaatataatatccagagaagggttcttccttgaggaaggcctgctcagtggcccactggcctctgctgccctataggtttgggcattatcccaagccttcttctcagtttgaattgtgttgtctaccaggcagtgcttgcctcccatagacagtgccagttatccacctgagacctggctgcaaggctctgaccacttctgattactgacatagaatttactctaaagataatcctaacctgactgcctcatttatatttctagcttgtgcttcctcctggcaaaccagacaaatgatgcatgtggtaaggggctggctcatctggtctctctctattcagcagaaggctacttggcctccacactctagcccattgcctcctcccactgatctgccttttatattgacatataaaatacagtgaaagtgtctgttagatatattagcaagatactagcatggtctttccactttacaccttttataagcactgtaactttttccaaaatacaaatgttttataaagaatagaaggatgattgtaaacaaagttgcacagatacttcctcaaatagtgacttttccatttgaatctttcttgtttctatctcttagctccattcagagcacttcaggctccccagcttgtcctgcaagagcagctttttctttcaaagctttgaccctttaaatttttcaccccctctagtggtggactagtctttctaatgcactgtttttgtcatgttcttctgcatctaagcagaggtggccactgttagatgtaagtctctttgccaggtagccaaggccctatgtaatgaaacgtactgtcccactagacttcctctccacttcactctcttgttccagcaggacagcctcccattgtcccttctatgtgcccaggctgagattgagagtgattactcaagctagaccaaaagagctgaattcaaatgacacatagatgaaaataatagtatatgacaaaagcaaagatttattaactatataaacccctgttatccagtataataataaaattatgttctaaatcctacaaagtgatcataatatctcttgattacccagagatccccaaaatactagaactactctgaactgggagaaaccttaaagaaccatcgatctcctaccaccttttataggcagggaaaatgagacccagagagaagtatgaaggccaggtaatgacagaactaggtctagaacccactgatgtcctgtgctgtcctgccaactgtggggcatttctccaagactggttttctgtagagattttttctatagagtttgtaccattttctctttcctttatagtcacatcttacatgggaacaaattgtactcaagaagtttgcacacaggctatagacagctgataccaagccatcagatgccattgttagtcttttaattctgccaatgccttgtttccttactgcagtattatagtcactactgtccagtacctgtcctctgcactgcacaagaatttcacagagactgactttgactttaaggtaggcactcctgaaatatccatcactattattgcaataaccttagaaagccaaaaccaagctcacttgttttttgctttattaatagattcatagtatcaaacagcttccaagcctgatgatgattagaatatgacctgggatacccctgttggaagtgttggtagccaaactccatgagtatgctttctagtccagaatcaacacaattggcttcagaaggagttaagggggaaaaaaagaaaaattcttgtttgcaaagatatttaaaagggaaaaaaaatgaggatcttaagattgtaaaatgggttctatgctacatgcatgtatttagtaacgctccctacaagattaagttcttagactgtcacattttctctttctctgtctgtctaggtgtggaattcttactttagcctggcagttctattcataaatcagccaagccttcagctagaaattatcacctcagccaaaaggaagaagattctagataagtaagataaacgtcttatattcatctccttaccacttggccaaatagggctatgtttcgttgagagttctttcagaggtccacaaggttctcagctgggtggtttcccaggggcccaagtgtgggagttcagtcgagagcccaaaggcttagcgcattgggaagcattagaaacaaacagtgctgaagtcctggcctcatgggtttgcagccctatcctcctgaaccttctcccactaacggttggctcctgtgttactattcttaggtatggggacatgcgtgtaatgatggcctatgaactgttcagcatgtggcagaatttgggtaggttttttctccctattcttcccttctatatattgcatagccaaatagaaagtagcaagactaataacatctcccaggctttatgaatgttaattcaggcccaagagatccttacatatctttcacataacacctcagatggatggtgtagcacatgtgcataaagcccttggcaaggagagtttgtctgagaaataagacctcagtaatacatatgccaaatccctttttttaggaactaaagtcaaaagaaaaaaaagaaaaggagggctgtagtagttttttccaatttgagaacccattcctataagatcctccatgctcttcacttcccagtctggatgttgcaggctcaaaagcttagatctgagatacccagtacatgagcaaaggtggctattaattttaataaagattgaaacatttattggatctctggtattcatgcatccagatcagatacttgacaccagttgcatggagtaacatataagaagagaactgcaacctctgggtgagatcagttttggcttcccttctttgcacagcttctgctttgaatgctttgaaaatagccactgctttgaatctaaatttgtcagatcagtgtttttggtagaatttctgggttgccctggtgactgagtgggccatcctgtgatattgtagagttctgagtggcctgtcaagatgctggagaactattattatttcaagtgaagtctgctttcagctgagctcatggttctgaagctgtaggaatgatggtcataaaatctccagtcctctgttaaccatccccaccactaacctagaggcagcaagtaggatatgaagtatttctgccggcgagagggccttctattcatgagtggggatgcatttccccaatcagactttccaacactctggttccctgtatccagcacagtttggaaatggattttaacccaaagttgactctgaaattcccaggaatgcaagagactggctactgtgccaagtaccaaaattggaatatgctgaaccagcctcagggctaaacatttgcttcttagaattttttttaataccagatttgcctgataaagccttttctgcctcatttcttttggtggaaatgacattctctggtccccaagaaatggttttacttggccgtagcattcattgcacagacccacagtttatctcctcaatagtctctgaaggactgagagcagagctctgaaagatggttcactctgttttaccattgcaaggaagagaaaaatcctatcccaccatccacaggactgtctctggcttctggtaacataccctagatggcacgccaatgagagggaaacccacatcacacacttaccatggaaatgcttcattaaggaagttgagggttgagctgagccaagtaggtgtaatggcaccatcagaaatgcaatatgaacacaaagggagttcagggtgggtaaagagagaatctctaagccagccttttagggtagggctgtgcaggagactcctgctagctcaggaggaggacttctttggcatacatgaacataggcagtgtaaaaatccatggacttattagacgtctggtggctagaccagggactggatatcctcatcacttaaatgtctctgggctagagctagaaactccaaggagagtgcattgtatttaagcagaaatattgggtttttcttgttaaataaacactgtgaatagaccatctgacactcataggttactcagaaacctattctgtctagagtagcaaactctgttccttcatctcagagagattttcaggtagtttgtgggactgtcaggaaattctttggaaaagcagttttgtgacagttgcgcatttgctttcactgggctaggccaactttatccataaactctaaaaagttgagggagagtacctcagaaaaccataggggagagcttgttttgctctcagaagcttccagtatggattgtagcatgtgttgtggccccatttgggaatcttccatggaaggagcaaagcaggcataaactaatttgggttttgtttttcaggtgaacataagatccactttattccgggaatgattggtccttttctgggtgtgacactggtcccacagccagaagtacggaatatcatgattcccatctttcatgacatgatggactgggagcagagaaaaaatggcaacttcaaacaggtaagacacctggcagtgttcggggtattctctggaatggatcccttctgcttaggcaggtggcctagatgaccaagccatgattctagtggggatgggctgtagtttggctaatttgaatcctgttcaagggttttcccttacttgctggccaaaattgatttgtggattttctccatgaagttagaggccagaaaataatgaggccaggaaagaatgaacatcactataactttctgatcaaggaatgattgagactgtagcctcccagtttcaatcatgatagggccctgggagtgtgatgtcattcctttactgaggattttcactgtataatccaggcatttctagggctgcagcccagaccagatgacttctcatggctcagggtagcccagcattttatagactactgcacagaggggttggtccaggagatacaggccccttggcttccaactgaatggcttcaggctgtcctcctgtgtagttcttttgccaccactaagtgtaggagatggcccctgcctttatatctgtagctccaggggatagtaccaggaccaataggggctaatgatgaggaagccaattttagctaatcaaataaataacttgctaacagcaaaaactgtccactgtaagcaggcctgctttgggagatagagattttctctcttggcagatgatcttcaagcagaagctcccaggaaacctctaggggaattttctgtattggcttgggaattgtaccagttccccactaagctccttccgagcctgtgattctgggatgaaccagtggtctatttagaataggtgactgtaacagtgagaagtagaccaggcaaacagtaatttttaaatatttatttatttttaaatttacatagagtaaaatgtattcttcttgatttacagttctatgtgttttggcaaatgcatagtcgtgtaaccactaccacaatcaagagtttttgaatacttaaaaattcagtcttgctgtctatttgtagtcaaacccttcccctgttcttaacaaatgcaaccataggtctgctcttcatcactatagttgtgccttttctagactgtcatataaatggaatcaagcaaagtgcagccttttgagactggcccctttcacttagcataatgctttgagaaattaatccatgtcactgcatgtatcagtagcttttctatgctgagtagtatttagttcattcattcaccatttgaaagacatttgggttatttcctcttttgtggattataaataaagctactaaaaacatttctttacaggtttttgtatgcatataagctttcatttttcttgagtgaatacttaggaataggattgttgggccttgtgacaagtgtgtaattagctttcgaagaggttctcaaactcttttctaaaatagctataccattttgaagtctcagcagcagtatataatcgattgctccgcatactaaccagtacttagtattatctgttcgtttgttttagccattctaataggtgtgtagttgtatatcattgtggttttcatttctatttccctagtgactaatggtgttgagcatcttttcatatgcttatataccatctttatgcttctttggtaaaatgagttcaaagcttttgttcattttcatttgagttgctgctttccttattgttgaattgtagggttctttatatattctgtatgtaagtcctttgttgagcatatgatttacagatattttctgcaaatctttagcttatcttttcatttactaaacaatatctttcttagaacaaaagtttttaatttttatgaagtccagtttgtcaatgtttttcttttatagatcatgcttttggggtcataccccaagaactttttcttaacatagggccacaaaaatttttctcctgtcttttcttctagaagttttatagttttacattttaaatttagatctatgatctattttgagttgatttctgtataaggtatgaaggatggatcaggttcttttttttattttgcaacaagatgtccaattattccagcatcttttgttgaaaagagtatcctttcttcagttgtctttctgccttggtcaaaaaccaattgccaaaaaaaaaaaagaaaaacaaatgggtttggacaaggagaagcttaaaaaaaagaaaaagaaaaaagacctttgaaactttgtattcaaagttaggaggagtaagctttagtgagctattgcaccacgtggtaactatagttaataataatgtattgtacaaaaattagccaggcgtggtgccacgtgcctgtagtcccagatactcaggaggctgaggcaggggaatcacttgaacccgggaggtggaagttgcagtgagccaagatcgcaccactgcactccagcctaggcaacagagcgagactccatcacaaaataataataataataataataataataataataataataatgtatatttaaaaattgctaaaagagtagactttaaatgttctcattgcaaaaaaaaattaggtgaggtgacagatatgttaattagcttgatttaatcatttcacaatgtatacatatatcaaaacatcatattgtactctataaatagatataattattgtcacttaaaactacttaaaaaatcaattgaccatatttgtgtgaatctctttctagactctagtccttccgtagatcagtatgtttattctttcatcaataccacgctatcttattatagtagctttatagttagtcttaaaaccacatggtgtgagtctgtcttccagttttgtcctttttttttcagtattgtgttagctatctaattctttttccttttttaaataaatttagaatcagcatgtcgatatctataacattcctgctgagattttgactgggattgcagtgattctataaatcaaattgggggccgggcacagtggctatgcctgtaatcccagcactttgggaggccaaggcaggtggaacatttgagatcaggaatttgagagcagcctggccaacacagtgaaaccccatctctactaaaaacataaaaattaaccgggcgtggtggcaggtgcctgtaatcccagctacttaggaggctgaggcaggagaattgcttgaacccaggaaagggagattgcagtgatctgagatcgcaccactgctcaccagtctgggcaacagagcaagactctgtctcaaaaaaattatatatatatcaaattgggaagaattatgtcttaatagtcaatgaaaacagtatatctttccatttatttaggtgttcttttatttctttcatcagtgttttgtatacagatcttacacatatattattagatttatatgtatttcctgttttttggtgctcttctaaataattccatgcaactgaatgatgttgattccttgaaaaaattttagactccctttattgtcaagtatgcagcatttcaaaaaattgttctacatgaacttgaaaacaatgggtattctgtgggtgagggagtaaaacttacgtttatctagtagctcaagctccttaattatattgtttgaacttctgtagcctaactaatgctttgctacttgatccattggttttaagaaagttcaattaaaatgttccactttgtttatataaatatataaatgattgcaatttttaaattttatttttgtttctaggatatagaaattcaactgatttttatatattaacattatatcctgtacccttgctaaatttacttattagttctggaagcttttttgcagattccttgggattttctatttagacaatcatgtcatctgagaatagagttttatttcttcctttctactctatatatctcttatttttcttgctgtatcacatcagccaggacctccaggatgatgttaaataagagcaatgagaaacttgctttgttcttaggagaaagtattcaccagtgttttaccagtgaatatgatactatccttatgtgcttctcctattaaacaaataaataaatatgatactagctctaagttttttatagattctttttatcatgggtaaatagtatttaagataaaacagtttgggagtgtgtagctctaatgcctccaggtctttgggaaataataacttcaaacaaaaaaggaactgttacttttctgtattgttacaacttgtgccttctaaatgtgcaaaatgcacaacacttgataaaaaaaaaaaaaaaaacccagttaccaagaagtggatgacattgcagagctatgcaatggctctgagtcagctgaagatggggctgggttacattccaccatcactaacactgaccagcctaaaaatactttttctaattatagaacaatatttatttattgtagaaaaatgtaaaatgcaatagtgggccaggtgtggtggctcacaccggtaatcccagcactttgggaggctgaggcgggtggatcacaaggtcaagagatccagaccatcctggccaacatggtgaaaccccgtctctactaaaactacaaaaattagctgggcgtggtggtgtgtgcctgtagtcctagctactcaagaggctgaggcaggataatcgcttgaacctgggaggtggggtttgtagtgagctgagattgcaccactgcacttcaccctggcgacagagcgagactccatctcaaaaaaaaacaaacaacaacaacaaaaaaacgcaatagctataatgaaaaattttaacccataatcctaccattgttaagaacttggagaggaggcagtttatgtcttttttcttctcaatacataggctttttttaacttagaaaatgaaattgttagagggctggcaagatggccaaataggaacagctctggtctgtagctcccaagatcaacacagaaggcgggtgattcctgcatttccagctgaggtacccagctcatctcattgggactggttgaacagtgggtgcagcccacagagggcgagccaaagcagggtggggcatcacctctcccgggaagcacaaggggtcggggaattcccttccctagccaagagaagccatgagggactgtgaactgtgcaatccggcccagatactgcactttccccatggtcttcaccacccacacaccaggagattccctccagtgcctatgccaccagggccctgggtttcaagcacaaaactaggtggccgtttgggcagacaccaagctagctgcaggagttttgtttttgtttttttttttcataccccagggcacctggaacgccagtgagacagaacccttcactcccctggaaagggggctaaagccagggagccaaggggtctggcttggtgcatcccacccccacggagcccagcaagctaagatccactggcttgaaattctcactgccagcacagcagtccgaggtcgacctgggacactcgagcctggttgggagaggggcttctgccattgctgaggcttgagtaggcagttttaccctcacagtggaaacagagccaccaggaagtttgaactgggtggagcccaccgcagctcagcaaggctgctgcggccagaatgcctctctagattcctcctctctgggcagggcatctctgaaaaaaaggcagcagccccagtcaggggcttatagataaaacccccatctccctgggacagagcacctgggggaaggggcagctgtgggcacaacttcagcagacttaaacgtccctgcctgacggctctgaagagagcagcgaatctcccaccacagtgtttgagctctgctaagggtcagactgcctcctcaagtgggtccctgacccccatgtctcctgactgggagacatctctcagtaggggccaacagatacctcatacaggagagctctggctggcatctggtgggtgcccttctgggatgaagcttccagaggaatgaacagacagcaaactttgctgttctgcagcctccactggtgatacccaggcaaacagggtctggagtggatgtcagcaaactccagcagacctgcagcagaggggcctgacagttagaagaaaaactaacaaacagaaaggaatagcatcaacatcaacaaaaaggacgtccacacagagacctcatctgaaggtcacaaatatcaaagaccaacggtagataaatccacgaagatggagagaaaacactgcaaaaaggatgaaaattccaaaaaccagaatgcctcttctcctccagaggatcacaactcctagccagcaagggaacaaacctggacggaaaatgaatttgacgaattgacagaagtaggctttggaaggtgggtaataacaaactcctccaagctaaaggagcatgttctaacctaatgcaaggaagccaagaaccttgaaaaaggttagacgaattgctaactggaataaccagtttagagaagaacataaatgacctgatggagctgaaaaacacggcacgagaactatatgaagcatgcacaagtatcaatagccaaattgatcaagcggaagaaagaatatcagagattgaagatcaacttaataaaataaagcaagaagacaagattagagaaaaaagaatgaaaaggaatgaacaaagcctccaagaaatatgggactctgtgaaaagaccaaatatacgtttgattggcgtacctgaaagtgacagggagaatggaaccaagttggaaaacactcttcaggatattatccagcagaacttccccaacctagcaagacaggccaacattcaaattcaggaaatccagagaatgccacaaatatactcctcgagaagaacaaccccaagacatataatcgtcagattcaccaaggttgaaatgaagggaaaaatgttaagggcagccagagagaaaggtcaggttacccacaaggggaagcccatcagactaacagtggatctctgcagaaaccctacaagccagaaaagccagaagagagtgggggccaatattcaacattcttttgtttttgtttttgtttttgtttgttttgagatggagtcttgcttggtcgcccaggctggagtgcagtggtgcaatctcggctcactgcaagttctgcctcctgggttcatgccattctcctgcctcagcctccagagaagctgggactacaggtgcctgccactatgcccggctaatttttttgtatttttagcagagacggagtttcaccatgttagccaggatggtctcaatctcctgacctcatgatctgcccacctcagcctcccaaaatgctaggattacaggcatgagccaccacgaccagccaacattcttaaagaaaagaattttcaagaatttcgtatccagccaaactaagcttcataagcgaaggagaaataaaatcctttacagacaagcacatgtggagagattttgtcaccaccaggcctgccttacaagagttcctgaaggaagcactaaatatggaaaggagtaaccggtaccagccactgcaaaaatataccaaattgtaaagaccatcaacactataaagaaactgcatcaactaacaggcaaaataactagctagcatcataatggcaggatcaaattcacacataacaatattaaccttaaatgtaaatgggctaaatgccccatttaaaagacacagactggcaaattgggtaaagagtcaagacccatcggtgtgctgtattcaagagacccatctcacatgcaaagacacacataggctcaaaatagaggcatgcttaccaagcaaatggaaagcaaaaaaaaaaaagcaggggttgcaatcctagtatctgataaaacagactttaaaccaacaaagaccaaaagagacaaagaactgcattacataatggtaaagagatcaatgcaacaagaagcactaagagacaaataactgcattacataatggtaaggagatcaatgcaacaagaagcactaactatcctaaatatatatgcacccaatacaggagcacccagaatcataaagcaaattcttagagaactacaaagatacttagactcccacacaataatagtgggagtctttaacaccccactgtctatattagacagattaatgagacagaaaattaacaaggatatccaggacttgaactcagctcggaaccaagtggacctagtagacatctacagaactctccaccccaaatcaacagaatatacattcttctcagcaccacattgcacatattctaaaattgaccacataattggaagtaaaacactccttggcaaatgcaagagaatggaaatcataacaaacagtctctcagaccacagattaagaaactcactcaaaaccgcacaactatatggaaactgaacaacctgctcctgaatgactactgggttaataacaaaatgaaggcagaaataaagatgtgctttgaaaccaatgagaacaaagacacaacgtaccagaatctctgggacacatttaaagcagtgtgtagagggaaatttatagcactaaatgcccacaagataaagctggaaagatctacaattgacactctaacatcacaattaaaaaaactagagaagcaagagcaaacaaattcaaaagctagcagaagacaagaaataactaagatcagagcagaactgaaggagatggagacacacaaaaacccttcaagaaatcaatgaatccaggagctggttttttgaaaagatcaacaaaatagaataataagagctatttatgacaaacccacagccagtatcataactgaatggccaaaaactggaagcattccctttgaaaaccggcataagacatagatgccctctctcaccactcctattcaacgtagtattggaagttctggccagggcaatcaggcaagataaagaaataaagggtattcaaataggaagagaggaagtcaaattgtctctgtttgcagatgacatgattgtgtatttagaaaaccccattgtctcagcccaaaatctccttaagctgataagcaacttcagcaaagtctcaagataaaaaatcaatgtgcaaaaatcacaagcattcctatacaccaataacagacaaacagccaaattatgagtgaactcccattcacaattgctacaaagagaataaaatacctaggaatacaaattataagggatgtgaaggaccccgtcaaggagaactacaaaccactgctcaaggaaataagagaggatacaaataaatggaaaaacattccatgctcatggataagaagaatgaatatcatggccatactgcccaaactaatttgtagattctatgctatctccatcaagctaccgttgactttcttcacagaattagaaaaaaactactttaaatttcatatggaaccaaaaaagagcctgcatagccaagataatcttaggcaaaaagaacaaagctggagacatcatgctacctgacttcaaactatactacaaggctacggtaaccaaaacagcatggtactggtaccaaaacagatatatagaccaatggaaccaaacagaggcctcagaaataacaacatgcatctacaaccatctgatctttgacaaacctgacaaaaacaagcaatggggaaaggattccctatttaataaacggtgttgggaaaactagctagccatatgcagaaagctgaaactggaccccttccttacaccttatacagatattaactcaacgtggattaaagactttaaatataagacataaaaccttaaaaaccctagaagaaaacctaggcaataccattcaggacataggcatgggcaaagatttcatgactaaaacaccaaaagcaatagcaacaaaagccagaattgacaaatgggatctaattaaactaaagagcttctgcacagcaaaagaaactatcatcagagtgaacagacaacctacagaataggagaaaatttttgcaatctatccatctgacaaagggctaacatccaaaatctacaaagaacttaaatttacaagaaaaaaaaaaccctatcaaaaggtgagcaaagaagatgaacagacacttctcaaaagaagacatttatgtggccaacaaacatatgtaaaaaaagctcatcatcactggtcattagagaaatgcaaatcaaaaccgcgatgagataccatctcacaccagttagaatgacagtcattaaaaaatcaggaaacaacagatgctggagaggatgtggagaaataggaacatttttacactgttcgtgggagtgtaaattacttcaaccattgtggaagacagtctggcaattcctcaaggatctagaaccagaaataccatttgatccagcaatcacattactggctatatacccaaaggattataaatcattctactataaagacacatgcacatgtatgtttactgcgacactattcacaatagcaaagacttggaaccaacccaaatgcccatcaatgataggctggataaagaaaatgtggcacatatacaccatggaatactatgcagccataaaaaaagatgagttcatgtcctttgcagggacatgtatgaagctggaaaccatcattctcagcaaactaataaaagaacagaaaaccaaacactgcatgttctcactcataagtgggagctgaacaatgagaacacatggacacagggaggggaacatcacacaccagggcctgtcaggggatggggggctaggggagggatagcattagaagaaatacctaatgtagaagacaggttgatgggtgcagcaaaccaccatggcacaggtatacctatgtaacaaaactgcccgttctgcacatgtaccccagaacctaaagtattaaaaaaaaaaaaaggccaaaaaaatgaaattgttgtgtatattggtttgtaatatcccttttttggtagcaacttgtcatgactacctcttcatgtgaattaatgctcccctatactaccctgtcagtttagagtctatatggtattccattgtatggctggactgtaatgtattttgttaagctcctaattttattttttttaattttttttttttttgagacggagtctcgctctgtcacccaggctggagtgcagcagcatgatctcggctcactgcaacctctgcctcccgggttcaagtgattctcctgcctcagcctcctgagtagctgggattataggtgcatgccaccacacccagctaatttttgtagttttagtagaaactgggtttctactaaaactgcaaaactatcagcctgttggtcagactggtctcgagctcctgacctcatgatctgcccacctgggcctcccaaaatgctgggattacaggcgtgagcccccacgcctggcatgttttgttgttgttgttgttgttgttgttgttgttgttgttgttgttgttgttgttttgagatggagtttccctcttgttgcccaggctggagtgcaatggcatgatcttggctcactgcaacctcctcctcccaggttcaagcaattctcctgcctcagcctcccaagtagctgggattacaggcgtgcaccaccatgcccagctaattttttttgtatttttagtagagatgggatttcaccatgttggtcaggctggtctcaaactcctgacctcatgtgatccacctgcctccatctcccaaagtgctggggttacaggcatgacccacctctcccagcccctaattttagcaactcaggttcattccaaatttttgttgttaatattgcaaaaaacatttattctcattttcttaggtaaatttctcaacctgtaatcactggatcaaagagtcagaaacctttcttgagtttttacagcacgattttttgaaatccagactaccttttctgtgtatgttccatctaagcaatcaccgtgctgagccgtgtcagctgtcatacctgcctcctctgccagatgatgggctcttagggaccaggattatttcttgtgcatttttatatctcagaacccaccatggtgcctgggacatggtaggctcatagagatgaaaatcaaaactagcatttattgagtgcttcccaagatccagggcacagtgacaccaaagaggaatgttaccaccattcctatttcacaaatgtagaaacttgggcttagagaggtaaatatcagaactatgcagctcattatatcacaggacaaatatttgttgaatgaagatgtcacttcaggaatattgtttctatggaataaaagtaactgcaaacttgatggtcagtgtcactaattatgacaaaatatgtttgaagaacttattattttgtttgacttacagatgttgattttgcatgcattgatattcagtgtcccatgtttcagatttctagatttctcctaataacttctcctttatgagctctgtaggggtgattaagtaatgtcccccatatccttccatcaccagctttttttttttttttttttttgagatggagtctcactctgttgcccaggctggaatgcagtggcacaatctcggctcactgcaacctccacctcctgggttcaagtgattctcctgcctcagcctcccaagtagctgggactataggcaggtgctaccacgcctggctactttttttgtatttttagtagagatggagtttcaccatgttggtcaggctggtctcaaactcctgacctcaggtgatctgcccgcctcagccttccaaagtgctgggattacaggcatgagccaccacacccagccccatcaccagcttctttgcctaatacaaagttcaaaacacttgaataggtatcagaagcacgtggaagattcattaaagcacaacttgtgtgctcccaccctgagtttctgatccaacaaactagaggaggcctgagaattttaatttctaacaagatctctggtaaaactgctgctgctggcccagagacccattttgagaaatatttaggcgccagtggactgttgtaccctgtttacactgttgtactctctgctgctccaggtcccctccccacatttttgctctgttctgaaggcacaatctacctataccaccatgtgtgaagagagatcccttgttataatcaggcccgtctcttgggggccttttagccagcaggttgacccagtgaggcaagaaaagctctgaagtgggactaatccaccttggcttctagatgcagctctacctgacttgacataaccccaggcaagttcctgcttatgcctcttctctacacaaagagagtgagacggcttcaatccctaaggaccccaggtctcagactttctgtttcttctcaaatgtatattcaagcaactcactcatccctgccctggccatgtagcagaccactattaaaaaaaaaaaaaaaaagagaggctatatttatttctctgtcctcattttctggtcatcggacttcagaggccctaactgccttcattgaatttactaattcagttattcttttattatttcttagccttaggattctttgctctctgtagagtgagaaaggcttctgtttatagtacattatttcatgcagccataccatggcttttttgtttatatgaaataataaataatatcacagtaccacagtttaaaggttaacaaaggggtccagtacggtggctcatgcctgtaatcccagcagtttgggaggctgaggcaggtggatcatctgaggtcaggaattcaataccagcctgggcaacatggtgaaaccccatctctactaaaaatacaaaaattagctgggtgtggtggtgcgtgcttataatcccagctactcaggaggctgaggcaggagaatcacttgaacctggaaggtggaggttgcagtgagccgagatcgcgcctgtgcactccagcctgacatagtgagactccatctcaaaataaataaataaaggttaataaaaggttaaaacaattttatatcatatcacttacaaccagtttctcacctcaaagtgaatccagtgagacctattagaaaagtggctgagatcaggataaatagtcaatgcatctgaggcctaatacctaggtgatgggttgataggtgcagcagaccaccatggcacatgcttacccacgtaacaaacctggcacaggtaccaatcaatcaacaatcaaacaaacaatcaagcacgggtatcccctgaacttaaaattaaattaaatttaaaaaaaaagtgactgagtactgctgaatgcccttgcaaatccgtggggtaggaacaaatatagtcttgctccttatgatttaggtatccaataacaaatgcaggggcccggtgatggcccagtgataggaacagcagcctcaagggctctaggttctgtgagtacaaacagtagagcctgttatcctgaaggaaattggctggaggaaacactcaaatctcatttagctccatttaatgccagtcattagagtgaggacaagctccccagaaagcatcctttttgactggctgactacagggtaaagttctaaccaaatgtattttacgcatacaaattcttttgaattaatgtttttaaagggggaaaaaaacatctgaaaaaggcctcttttgaatccaaagtacttttctctgtagggaatccttgccttttgcccttagattggaaagagtacctgagacttttaagtcctatctctttttcaaaccattagggtgggaggcctttttgatttggggagcagaatggtttcttggtgctataggtaaaatactaccttccctgggatttctttggagcaaggacaggatcaggaagtagtttcccaccatcctcacccaccacaggaactggatttcccattctttttctgaggtcatctcaggtttatgaagtctctgcttccttctaggtggaggccgagttgattgacaagctggacagcatggtgtcagaagggaaaggtgacgagagctacagggagctcttcagcctactgtaagctgctccagccccaggcacaccacactgggggatgggatgaagtgggccaatgaaaagtagaggttgcaactgcactggcaggctttagaggttggtcatcaagagggacctgggttgttcctgatggtagcaatgctcaacttctgtcaacaagaaaccaaggtctttcagggattcccatagttgactgaaaagatagaaaacaggtaatctctgagctcctggatttgctgacaggaaaaggatcattgcgtgtcttcataacatgcactgcatctggatggggggcagacggttcatggagactcagttctgggctcaatgctggcatttcaaggtgggggataaatcctcctttgagagacaggttcctgtttgccctgctttgtaaggtagtacaatcagctcacattgcagtgagctcttgaacaagctgcaacactctttccaggccagttttcatgtttgtggaatgagatggttgtactgaatgatgtcagggttcttctggatcctccattccatggtttctggcttgagttgatggaggccaagagacctgaagagagacccaggggaactatggccctcccaagtagatagtgatgttgctattttatcttcctaaaaaatgaaatcttaagatatttatagctctagaataccctccccatcttacttatttccaactttgagatgttctttgttttagtaccattttgaagacaaacctctagcatattttttcaggaataatactatccatttgcttagaactttccagtgtgcaaaatgtattggcatttcttaccttatttgatcatcacaacatacctgcaaggtgtgcagagtagaaattatcttccctcccacttgagagataaagaactgggctcagggaagtgccagcctgcactcagttgcatgatcagtaagaggcagctctggaaggagggcccagatcttctaatttaaaaaggggggagtctcccctatactatgcccattttgtttcttgaggagtcatgaggtaaaatgtaaatttatttttaatttaaataattacaatttgtgaaaatgaatccatactttagtatttcttttttagccgaagatttgtctaattgtggaaacaaggcagtgttccttggccactaacaaatgactactacaaaggaaaaagtacaaaaataatctgtaattactaattacctgaccaaatcatgtttataagctcttttaaaatcagtctaagaactgagaaccactgataacatggagcagcattttccaatttgtgtttttggaagatgtttgtaggtatgctaaaaaaaaaaaaaaagtaaatcatgggtgaattagtttagaaaagattcagctaagcaaaattgaacaagcctctttattgtaggacttctcaaagcctttgttgtgcaaaaggatatgagctgggtgcagtggtacgcacctgtaatcccagctacttgggaggctaaggtgggaggattgcttgaacccaggagttcgagactatcctgagcaacatagcaggaccccatctcaaaaaagaaaaaataaaggatatgaaaaatctccaaaaggagggtatagtgatcagcatttcccaattttccatgcttgtgtgctcacagaacatttccacctgtcctctaggacagagacctctgtagaacacatttgaaaaatgctggtacatttctcaacggataaagccacagaagtcagattcagtgttcttaccttctctaacaacaggagtcacctggaaaaccctcactttctcagaagcctggcctaggcagtatgctctgtgcaaggagacagtcatcattgtagcagcagcattaacagcagtcaggctgtgggtttgagtccccagtgctagacccctaactgggtctgccaccccaggtgactctcatgaccttagagagcaaggaatagtgtggaaaggaatcaggaatagggttgtatggagtgaaggatggacctgggctcatcactggaacaagcagaaagagttcaggtcattgtccattaggaaagacctgtgcgatggcagaggatctcagaagccaggcttttggagaagccaggggctgccctgaggtaccaggagcatggggttgtcaagtaagaaaagaacctggacatttagctcctggctctggcacattttgcttgggagcattccctgtgacagtaggatggccaagtatagctcctggacttgctcactttccctcatgttggggccccaagactagtggaatctttcccttagtttccatgaagatgatgggtttaagctgggtatggtggctcatgcccataatccaagcactttgggaggtcgaggcaggagaatcacttgaggctaggagttcaaggccagactgggcaacatagcaagaccccatcttaaaaaagaaagattaaaattttgaaaaacagagcttggtgaggatggctctgggcagtgataaagacagtcagccattggcaaagtcaggcttatccctcagtgggctcttgttcaactactgcttcagaacagacctcaactactcctttagaacagaagagaagtgagttacagtgtatgcctaaggtggctggagccgaacccctccctccccccacctcagtggcatccttaggaacttgtacatggaaatagaagatgtgttttcatttgttgctgccagttcagtaacctccttatctttgctttctgctgcatggagtagaacccagctgtttgggccctaccccaggtaagactgcagtgtggtaagtctgctgtctccagatccatcacagcctccatgggctcttggacttcactcttgtgcccaggagaaggctcatgaattgtgtttgctttctccacccctccaccaatagcctgctggagaaggttgaacaagaaacatggcgcgagaccggcatttcctttgtgacctcagtcacccgcctcatggaacgtcttcttgactacaggtatcttctcagccacccgctcccctcttcccttgtcaggatactctctctggcaagggaatccccctgacctgaaaactgagaccatgtgctcttcatggggaggactgttgtgatattgggtgccatcaccagtcaataggaatctgctgatgaccaaggagagacagagacttttcccaggggtaggctagggcctcctgggattccccactaaaatgtgggcacatgtaccctggagggatctcagggacatgtagtcatctggccttccatccagaagggtcaaggctcagaggaatgggcacagcaagagggaagagtaaagctgtctccagagcagggcagggaacagctgtaggtccttagtgcagaccctcctcagaaccatatggcagatgagcagagaagtatcacctggaggacttgaagttggcttttccagggactagggaccccacttttcaatgcctatattctttatctaaaatctatgtatttctgtcccttggtcgtggccagaatagattagaggaaacagcctgtgagctcagagatcttcatattatgtccagtctgggagttcatgtggaataagaatttttttttttttttgagatagtcttgctttgtcacccagactggagggcaatcatggctcactgcagcctcgaagtcctaggctcaagcgatcctcccacctcagcctcctgagtagctggggctacaagctcatgccaccatgcccggctaattttttgttttttgtttttgtacagacaagttcccactgtgttgcccaggctggtctcaaattcctgggctcaagtgatcctcccacctcaacctcccaaagtgctgagattacaggcctgagctgctgcacccagccagaattagaatttcttaatgaaagtctgccttctcagttgtatcatggcttttgaattagtccaaacatgacaatgaagccacaactgcagccttaatcattctctcagcagggttcaggtgatggctgaaggtgccttttgggagcctggaggaaggtgaggagaaatgataaatgaaacccagctccaagcaatagttgccttctctgtgctataagctgtgcaaatgccaaatgaggggagcattttcagctcatggatcaggaaataggagagttaagcctggatccagttgctgctgaagtagaagatgctgctatgcaaaagatacaggtgtccaatgcactggcctggatatggaaatggaattcctgagaaatgtgctcatgtcttaagcatccccccattctgtagcacagctatgcttgtgtgaactttagcccatttttcctgggcctttcgagttcaaagctggccttggggccccttttacagcaggagacttctttgttcacaccaggtccgtagcttctcctgcagctgcaattagacagggaagagaggtgggtaaagtgctgcacctccccctttccaaaacattttctaaagtttggctttattcaccgtggcctaacaaaggagcagaaaataatttcttaggctccaaggccttattctagccgcctgtttgatttctttagctgccttctacaagcagctcaaactcatgcccaaaagcaacttcattctctatttcttgtctcaatggtggtatctacaaaaaggccaaagtctttaatatggcatcactggcctttactcacttctccagaccaatcttctgctagtccccagtactcatgccctacacaccagcctcccagtgttgcttcttgctaacatgaaaggaaacagcataatgttgatgatggcccctgtttattgaaaatctaccacgagtgctctacatacattttctctaatcccataagcatcctcattctttttatccatgaggagacaactaaagtatacatatgtaacaaacctgcaggttgtgcacatgtaccctagaacttaaaatataatttaaaaaaaaaaaagaaaaagccaaaaaaaaagaagaagaagtaccactgctaggatttgaacccagatctagctgactcaagaaccatgccctatctctgtgtccatgttgtcaccacttaatcacttgtattttcccttcaggtttctctgtatgctgtgttctctcccaagagtggtcttccaactcacccctattaaggaagctttcccaagccaggagcttacctttccgtgcacacattgaatgatgatcatttgtcattctgtcttaccttacaaaagaggaccagctccttgaggataggaaccttgtccttatctccctgttcccctgtatgggggccagctcctggcaggtgcatagtaaataatgagtgataaacttgttggaaagaccatgcaggaaccaagcaactcttttcctctgcctcaatgcagttagttcaagaacttactaagaaaagagttgttggccaggcacagtggcacaagcctgtaatcccagcactgtgggagaccaaggcaggcaaattgcttaagctcaggagtttgagaccagcctggacaatatggcgaaaccccatctctatgaaaaattggaaaagtagccaggcatggtgacatgcacctgtggtcccagctactttggaggctgaggtgggcgaatcactttagccggggaggtcgaggatgcagtgagctgagattgcgccactgaactccagcttgggcgacaaaatgagaccctgtctcaaaaaaaaaaaaaaagaaaagaaaagaaaaagaaaatagttgttgatatgactcaagggaaggacatcaaacaaaaaggaaaaaataattgttcaaagttttaaaatacatacattgattaaacaaataatcaatagattgtactctagaattacctgaacctgttatgtaagactcaattttagactggcaaaactttaggtactcagaggaatacctcttcaacttttatatcaatgtctttaacttttgtgtgaatctcagacactctgtgtcagacatgaagattctcactggtagtaactatatttcccaggttaggaagcagagccctagaagggtttttttgtttttttttttgtgcctggaacagacagggacagagctagagttgccaagcccttgtggctcagagtggaacctctacctggaatgggcaactgagggttatgaagccttcctttcccaggcctctcaggttgcaatgagggcttcctggtcactgatgtagtccccagccagcccactactcaggtgagccggatgcttcagaagcctctttctggagtcttccctgctcacccttcagagaaagagcaagaggaaagcaacagctgcacctaagtcagactttaaaaggcatccaccatgaagtagccacacagaagtgatgcagaggtacacaaaaaaagagtctgctgtcagcagtgcagaggagaagcagtcatagagcacagaagtgtgtaggatgcccctggtatcacagtgttgaggccagttcctttctgtttaagggacttagctatgaagttctggttatggccaaatagaagttaatccgtggtaaatgtttcagatgctttatagaaaatacaaatcactaaatgccaaagtggctaggtaaaatctcactgcccttcatggggccaacttactggggagacagatgccttctaccattgtgtgggttgcttggaacaacttggccatctgacctcagcctcactcctcgaaaagtcaagcagtttcctggctctgctagcgctaaagggacaggttctgcagagggatgttcaggaccctcatgtctggctacataggaaccaaatatcttacgtggtgaatgtgctgataggtcaaacccccctagaaaggagggccttggttccaaacctctcaaacctatcaactctgacaggagacttccacaggaaggacatttggctttgcagaatatcatgagaggagtatggattttcaacatccttttctttcaaagaagtcatcccaaggttcttcctctgcatgatgggaaggtggggagaactgggtttgtcaaatgaccatccagaggctcagtgacttggcctagggaccctgactcccagctgtactgctcttcactgggccctgtgcctgccagtggagcaaagccaaagacactctccaacctgaccctagaaatctgtataaacccctttctgcagcttttccccagagctgctaatacacagctgcacaagaaactagatcttctccatagcagtgtgggctgctatggaaggagacacatcaggcagatggcactctggctggcataggagatgtcttgctggattcaccagtctggttctcattctccttcatctccttgtgccaggcttctgctcctttccagaggagcttggctttgaccaaccctctccctatcttggaaaagatccattctcagtgttcctattttcctatctctcacaggccatccctgacccctcctacacccagaccctgctaggtatgaatgcagctcagtcctggctgatgctttaagcacgagacctgctgcttctggtgatagatggctccaaacactagtacacaggaaggaaaccatagggagaaatgtcaactaggtggtgaacatgtacagagccctgaagctagggccctgaagtggagggtcttggcttctattcagcactcctacaaaatgaaacctgccctttaaggagaattctgtgcctccctttttgggaagttgaggatttggccttccacttaattcatatacccttttgtgccaaggacattggtaggtgccacttaataccctgatgtagctctgggctctctctgtgctctgccaccagaataaggggctcagttgaacagagatctttgagccctgagagtggttccaaagctaaaggagctcacagtagagtccttatctatggaagcagttcctgttggaggccatctcaatctgggatttggtcatactaatgccccagtgatagtacagttctatgtgttgtctcaaggccccacttcatatctggtgctcatctgtgctctctcttccagggactgcatgaaaggagaggaaacagagaataagaagataggctgcactgttaacctgatggtgagaggacatgggccctgacttctctctgcctactgaaatggtttctgtcctgcactgtgattggcttggcccttctacaatacatggctgcaggcctaagggtttgaatcaggacatcagctctgttactggtatcttagaggcctgcactcccccaaacacattcctacttggggaaggaatgaaacgagcttctctttggatagaactctagcctggcctcttggcaaggacccactaaccctgacatacccaattcacagtcaaccctgactcctgatctgccctgatgcttttcctcttaacactacccagggctcccatagacctgccagtggttccacccacagcaggtgttccttctggctggtgctttctccttctggtgctgtctgcctccagggcctgccctccccctcctgcccagcacacccacggctatggccagctgcccagagcttggctatggcttccacaggtagttgacaggtgtttccttctctttattgtagaatttttacaaatctgagattaacaaggaagaaatgtatatccgctacatccataagctttgtgacatgcacttgcaggccgaaaactacacaggtaagtggggagaagagagagccatgcctgaccatgaggacaaactgaagggatttgtacaataggcagagaaaggcttcaggctggtgcctgccagatctcagcagaatgttggggcttgtgctatcccctcacctcactcatttccctcaactcctttgtggcacatggtagagagaaagcaggcagaacttccacttgtgcctttgtgccatgtcatccactacttgagtctgtttcactcttcttccctcctatccacccctctgaagtctcaagggtgacctccaaattctggtgcaccaggttcagagcatcctgagctcactgtcactccttatgaacagagagccttttttaggactttcaaagctggagctaaggttataacaaaggaatatccccctaaccctggaacttccagaactcactagcagaccttccttgcaggctaggctcttcagaccctgcaactgcatagcagcctcacattgtgcactcagttcactagcagaccttccttgcaggctaggctcttcagaccctgcaactgcatagcagcctcacattgtgcactcagtgtagagtataaagaatgttcatctgacttcttgacaggccagatagggctcctttcattgtatctacaatttaatccaatatcaaggccttttctaactagaacaaattttaaagcatttcaaagtggctgtcacatctgtttactgagaaccacgctgaatcggggttacgtgcatgcatgtgtgtcctatctgattgacttatgccatcgttccccccaaagagccattttctccactgtggtgaccagccattatgtcttagctcttaggcgataggacttgaatttgtgtgatagatcaggaaatttaagctatccttgtctgcaaacgctactgcaattagatagatttgtagaaacagagaatcctccttctttatctctagccgttagagagtgtttggcatagatggtatcttatctgatagcatagcttggcaagaattaaatctaaaatgactgggctttgaatcttaaattcagctgactaataaaataaaatgactgggctgagtctaccattctctgcatccacttgcacccatgatcccagcaaccctctgagagggcattgaagagaaagactttgataaatgttatgtatcagtagaagcatttgctaaactcctaggaaacggggccatgactgagaggctgggtcagggattttaacagagaaagagtgctaagccttgtctctgatggctcagggaatgacatctgaaaagaatataggcaaggaagaaaaagacgttccatggtttcctaagctccagagggaggccctgagttccacagggcttgtccctagagagaaaaggcttcctgatcccatgaggaggcgtgtacattccttggcaggaagttccagtggcaagggcacaggcaaaaaggcaaggatgaggaggagcctaaagagtggacacaggcaagtgggcctagctaaaactggaagtgggtcaataaatggttagaaatgagattcttcatagtcatggggagtagatttgagtagggccttgaaagccaggcagaagcacagaagctagaactaactaacttgccagtaggagatgcccactaaaaatgaacaaatagaacagagagaaaactgtgtaatgaggcccctgagccgtggctgtgattcagtatgactcatcccttggaatgtagggagccatggtatttcactgctgttgttttacataaccttctctaattgttccacacatagagtaagatgttgccaggccttcactctgggtctagtatcaatttaggttcctttggtaatggagccctaagagccagttctgagaaggttggaaaggaagctgtagtcagttgagcaaaaaggaacccaagagctctctctgatgtgtcaatgtctcccaaagcaaggcagcctgtgcacagatttttgggtagctgaaccattctttattaatctggaggctggaacaggtgaccaggccatggaaggaaggtgtctaccagaatatttggctccttcatgctgtggacaagggttattggcttgttgagcagccctactgtttcatctttagtatccagtgtccccgacctgggctgcacatgacttgcgctggcattctgcccagcatagtcctctgacaccaggctgctcctgggcctctgagcaagggaagcccctggacctccatgctgtctgtccccacagaggccgcatttaccctgctcctttactgtgagctgctgcagtgggaggaccggccactacgggaattcctccactacccatcgcagacagagtggcagcggaaggagggactgtgccggaagatcattcactacttcaacaaaggcaaggtatgcatcattaggcaagccctttagcccttcagcttctgctgtgatgcatggcatcttgacaccatagggttaacagcagctgcagggggtagtgtgtggggtggtgagtgggtgggtgcctatctatgtgcctaagatgtggaggcagcatgattttctctgagggagaaaaagacaacagcctaattctgtggcttgaaagccatatccagattgtaggtgttagagactaccctacatactagctttgcatatctataaatatgaatgcttctacagcaggggcttctggaaccctgtttgtttttattggatttacttaaagaactgatacggctttctaatctgctgccatataaaatatgagtggtagaaatgaatggattttaaccacagccaaaggcggcctaaactgcctcttactggtatgtgttcttttcttagatttcccttctctacagcacagcctgggctcctctcatattggggttattttccatcaaactactttctatgggattggcagcattgtcagcactggtttaggcttccttgggacttcccagccattctcctcccatctctgggagagctctgtgtggcgccctctgactacctactgttagatggggcccttgtgctggaaaaacttgttgaagccattttctcattactaagctttgagcacattttaaagctgaaatagggtcattcatggaactgtagtagctgagcccccaactcaaatggaaattggtttttgagatgagttttttcatcaaaaagaaagatttaaacattaatggcttttgtctataaatcagaaaacattcttcagttttacataacatgggggacttctatgtttgtcaaaaatattcactcagaaaacatttccccatacagagaatgcactggtaagcaagaacctttccaaaagcgcagaaactcttatgtaacctagcccagaaaggatgcccatgctcagctctcagccagcccatgcaactgatccacaatgctgacccaaagcctctggtccttgctgatccagcgcctgacacagagcccctcacatgcagttttaggcctattttcctggcacctggctaacctggagctgcccctcaccctcatgcccagcaagccctcctagctcacagggaatgacataagcgtggtgtgagtacgcatgtgtgcttctagtgcattcattctcatttctttccatgggcacagagtacagagtggagagttatcctaatctgactgagtctacccgtgggatgcatgagcattgatggtcccctattcatcccacattatagtaatgcatagaaaagcaggattaaattttaacatggactagggagtaaaacacaaagtgtgcctgagtactgtagatggacaagaaggagagaaggactaggaggctccataggccaccttctcaggaatctcctcacttctgcaatcctgcctttgccctgaatttctggaggagcagagtctatgctgagtagagaccactcagtgagccccctcatgagctcatcctcagaggggcagttatcagacccactgtcttaggctcacacagaaggcctaccttgtctgttcctgtgcctcagctcctgatgaaactattaggtgagattaaccagtccttcttgaaaatattccgggttttcaagaagaaaaccatggttctagaaaagcaaaacccagatgctatgggaaaaaaaaatgctcccgtggggcagggatgtttagcaccaagagaaaagccaccttggcaacaagagaagggcaaggaaagaaaggaggagcaggtagtgagtttctagctctcaacactgccagcacaccctgcctcacaaggcaagcccctcctggcttttcttccagacactacccccaagagctgccccatagggactgctcatttaggtgatgatggccccatgtagggctaaagatgccctgcctgctgacagtagcttccagtgaaacaaatgtcctccagtgggatcaaggctcatctatcttgctggtatctcttccctagtttgtaaccatgctgctccaaggcactcactccaaggcctctactccagttacctttagaatgaacaaggacaaaaagtagtagaagagaagtgattggatttcagagactggtaaggcattttggagtagctttgctttctgcctgaaggagggaaaccaaaggaaaagatgtagatggggatgcattgcacctgtagtacacttgctacctctgtgcagaggcagctctcaaagcccccagacccaccattgttccagtacacccctcaaagctggcacatgctctctggtgtctgccttagacaacacaatctcccttggtcccatgtttatgtcctgggtacccaagaggattagccatggctaataacatggccatagcctagtcctgggccattctctcctgtagtgaggtggttcacttacaaacctgctacaagttggactgggctctggtccacagacagtcagctctcccaggccagacaaggagagagggaaactccaaagagacaggatatggcagggtgagagtttagagaaggaaggggtgatgtgaagatcagagctggtcctgcatctctaggtggaggaagcaggcaggaggagaagctggacagaggctagcaaaccatcagggctagaccagccacttatgtgggagagggcttgggctctcctgcttgagggtttaccatggtccacactcatttgaaggaatgactgttacttctaatatgtaatgtgcaaacagactgccagacaggtggcccatgcttttcccttcctttgccatttgattagaatgacccctaagtcagtacaactttttgtgctgtccctgcgagggagcaacaaggatatataaaagcacatattaggccaggcaaggtggctcacgcctgcaatcccaacacttcgggaggccaaggtgggcggatcacttgaggtcaggagttcaagaccagctggccaacatggtgaaacctcgtctctactgaaaatacaaacattagctgggtgtggtggcgcatgcctgtagtctcagctatttgggtggctgagtcatgagaatcacttgaacatgggaggcggaggttgcagtgagctgagattgcaccactggactccagcctgagtgacagagcaattctgtctcaaaacaaaacaaaagcacaaatctgcaggagctggtagaagtgactggatttcagacactggtagggagttttagagttagctttgcctcctgcctgaaggagggaaaccaaggcaaaagatgtggatggggatgcattgcgcctgtagtatatttactaactctgtgcagaggcagctctcaaagcccccaagcccaccagtgttccagcatacccctcaaggtttgcagagtgtcttaaaatttttggtcctggctcattctaaagataattgtggtggagaggggtgccttggagcatcagggttacaagctagggcagagatgccggcaagatagatgagcattgatcccaatggaggagaagacctgttttttactgaaagctactgttagcagacagggcatctttagccacacatacagccattgtcatctaaatgagcagtctcccatggattggctcttggcaggctggccagaagtctgtatacaactcagctgtaaacttagctagcccccatgaagctgccagccaggtagaccctgttgtgggtccattgctgaaacctgcccaagcggcacttggagaggactgatatacgcccccttgaaagctgtgataatgggggtacaagaggctttctagctcactgaggcacaggcattatattaaagcaaggagtcagggtctatttgaaattctgtttggctgggcatcgtggctcatgcctgtaatgtcaacacttttgagaggccaaggtggtaggatggcttgagactacgagtttgagaccagccgaggtaacatagcgagaccccatctctataaaatattttaaaaactagccaggcatggtggcacacacctagccccacctgtagtcctagctactcgggaggttgaggcaagagaatctcttgagcccaagcattcaaggttgcagtgaactgtgatcatgccagtgcattctagcctgggtgacagagcaagaccttgtttccaaaaaaaacaaacaaacaacaacaaaacacacatgcacacacacaacaacaacaaaaacctctttggtttgttttagtctttttaattggtcctgcagtttcaatccatatggtgttaatttctttgaaggatagaaaaatgtactcttttgagaaacacaaccccaaatgaaacagtgttttccttctccttgatgctatttcaaagagtattcttacaaatatagtccttatgtttaatgatttatgctgaaatatttaccggtgaaattatatctgagatttgtttcaaatactatggggaggaataagtgaatagggtatgaataatacaagattggctgtgagttggtcattgttgaagctggatgatggataagggtttattcttctagtctctctacttttctatatgcttaaatttcctataataaaacatttttattagtattgagaagttggggagcctgggtaaaatatcaagtaaactaatgaccctcaatctaaccaaaagaggtatatatatttttaattatactttaagttctagggtacatgtgcacaatgtgcaggtttgttacatatgtatactgtgccatgttggtgtgctgcacctgttaacttgtcatttacattaggtatatctcctaatgctatccctcccccctcccaccaccccacgacaggccctggtgtgtgatgttccccaccctgtgtccaagtgttctcattgttcagttcccacctatgagtgagaacatgcggtgtttggttttctgtccttgcaatagtttgctcagagtgatggattccagcttcatccatgtccctacaaaggacatggactcatccttttttatggcagcatagtattccatggtgtatatgtgccacattttcttaatccagtctatcattgatggacatctgggttggttccaagtctttgctattgtgaatgtgctgcaataaacatacgtgtgcatgtgtgtttagagcagcatgatttataatcctttgggtatatacccagtaatgagatcgctgggtcaaatggtatttctagttctagatccttgaggaatctccacactgtcttccacaatcattgaactagtttacagtcccaccaacagtgtaaaagtgttcctacttctccccatcctctccagcacctgttgtttcctgactttttaatgatcaccattctaactggtgtgagatggtatctcactgtggttttgatttgcatttctctgatggccagtgatgatgagcattttttcatgtgtctgttggctacataaatgtcttcttttgagaagtgtctgttcatatcctttgcccactttttgatggggttgtttgattttttcttgtaaatttgtttaacttctttgtagattctggatattagccctttgtcagatgggtagattgtaaaaatattctcccattctgtaggttgcctgttcactctgatggtagtttcttttgctgtgcagaagctccttaatttaattagatcccatctgtcaactttggcttttgttgccattgcttttggtgttttagtcatgaagtccttgcccatgcctatgtcctgaatggtattgcctaggttttcttctagggtttttatggttttaggctaacatttaagtctttaatccatcttaaattaatttttgtacgaggtgtaaggaagggatccagtttcagctttctacatatggctagccagttttcccagcaccatttattaaatagggaatcctttccccattgcttgtttttgtcaggtttgtcaaagatcagatggttgtagatgtgtggtattatttctgaggactctgttctgttccgttggtccatatctctgttttggtaccggtaccatgctgttttggtcactgtagccttgtagtatagtttgaagtcaggtagcgtgatgcctccagctttgttctttttgcttaggattgtcttggcaatgcaggctctttttcagttccatatgaactttaaagtagttttttccaattctgtgaagaaagttattggtagcttgatggggatggcattgaatctataaattaccttgggcagtatggccattttcacagtattgatttttcctatccatgagcatggaatgttcttccatttgtttgtgtcctcttttattttgttgagcagtggtttgtagttcttcttgaagaggtccttcacatcccttgtaagctggattcctaggtattttattctctttgaagcaattgtgaatgggagttcactcacaatttggctctctgtttgtctgttattggtgtataggaatgcttgtgatttttgcacattgattttgtatcctgagactttgctgaagttgcttatcagcttaaggagattttgggctgagacaatggggttttctaagtatacaatcatgtcatctgcaaacagggacaatttgacttccaaaagaggtatatattttttttaaaggaggaaatggataatatcgcctcttaatgaaggccactgcagccttctctcaggctgttgcatgggcatgttgctgtaacaagagccataccacagaaagcctggaatctaactaggcaaggatcatctgaagcctaatttaaggtcaaatagttccataaaggaaattgtcagacctactgccaagtccttgagtaggcattttcttcttggtttccatacttgtttctgagcttaaactatcttaatctaaaaattagtgtttcattatctcatcaaataaatctttattgagtacctgatacatccctggcattgttctagtctctgagaacaaaataaacagggtccctgccctcattctgtttctcatctgattgagactaatacaacaagaaaagtaagtaatttttttaaattaagataacttcatagtaacagaacagaaatggacaaggaagtgcctgttcttgacaaagcagtcagggaaggcctcttggaggtggagacatttgagcagagacctaaaaactatgcttgagctagaaagccacacggctgtgtcatgccccccaaattggtcttgaggtatatgttctttgtgacacatgagttggagctggcgggagaccttttgttgtgtgtcttctgatgtgtttaatgtgggcttaggctattctgaagatgagatgctgaagccctgtttctgtttctgacacagagctgggagtttgggatcccactgtgcagggagctggcgtgtcagtacgagagcctctatgattaccagagcctcagctggattcgggtgagctgtgcccctccccccaccccagccctgactggcatcagtttctaaatgagcgttctctatgggcccagcccttagtttagtgctgtggacaatacaagagaaacaaaagccaagactcctgccctcaggacacttgcagtctgactaggaaaccaaaaataacacctgacaaataattgtatgatctagaccccaagagccactggtgctcagagaagggagaagtggcataggcaggataggatggtggtttcaagaaggaggtggcagctcaacttcacagagaagcttttcctggaatggttttgtttatggatgcttcatccaaaatctttttaagagctttccccactttgcttatggtcacttttaagcatgttgtacttgctgccttctttgatgcagaatattaaaaaattaaatcaaatgctcgatggctttgaaggtctgcgccaaatttttcctggttgctggtgctcggttctgaatcataatggctgctgatttcatcagcaaaaaagaggctagcagtctcaactcaccctttctgcaccctcatctttgtggctaactctcctgttctatgatccagattggtgtttgggcatgttcctctagcagtggcttcttaaccagttctggcaggctggcttgattgaatgcattatagctatcttcccaatcaaagttgcagtgagtttttttctgaatgtgaagccaggtcagccacaagtaaaaaagttacagaccttggaatgctagacatcatggatattagttagcttttcaagtttaaaatatcttaacttggagtgagtaccagtgctgttgtcatctgagccttcctcactacagttgttagcatctttagtcagatgatagatgaacaagagttggactgatgcaaaatggtggtgagaattgatggtagccagctacaagcaacctagtcagaggtcaactggtatagtgagtattggtcaaaaccagaaatccccaggcagaaaatgtccgtgttaaaagtgtgcctcccaagtacagtaagcccagatctctatagggctgagtccattccctaggaaggacattcacagcagctgcacgtggctgcagtgggcaggcctgtccccatcccaccatcagacagtggtgatggagggctttctcttccatgatgaaactccctggagagaggctggtcatgtctagaggctcacttacttcttatctagattgagttgccatgatccctttccagaagacagtgtccagttgggcctgggagaacttcctttggataccaacagcagtcaagccaacctgaagacctttctcattcacagaaaatggaggccagctactatgacaacattatggagcagcaacgcctggagcctgagttctttcgggtcggcttctatggcaggaagtttcctttctttcttcgggtgagtccattcagatggtcacaagaacttatatattttacgcataattcacttaaaaccgatattcttttcttcccctttttgccttttctactgaatacttctttacagaggataaaccagttaacaacaggcatttggttttatttgactggactggctgccaacttcagactctgttttagtctgctctgttattctgtagctaccaggaatgtgtgagggtggctttcttactaaatcaatggagtttcttcaggaagtgaccagggtctaagagtgtgccataggtgccttccaacttctgcctccagtgcctggaacctccattgtgactcttctcagccatatagggcaccagtaaagcactgactttaacagtagactggcctcttagggtttgtcatctaagatgatggtttttcctcctggctgcactgtagcctgtgcagccaggatggagaactgttggtatgagagaacctgaagaacacagcatgtggctcctaggatcctgagggagctgccaagcactgggtttggctgtagaaagcctcttctaggcagccagttctctgacccaggatgacaacagccttttctccctaccgttccctggcaggctgaactggaatataaaaagagtggaaaggatgactgagcatagatctactgacaccagttgtgattttcttatttattcagcacaactcagaggctctaggagtagtcaacatacactataggctgaatcccatagagatgtgttctcagatgatctaaatgaagctgccctgatgtgtgggccctggagcagttgagacctaattgctaatcgctgatcacccccagttccaatatctttaactaaagttcactgtccacaagcctcagcaagtagctgggaaaattccctttgatatgtttgggatcctgtcttcttggagaaattgggttagccaatgagcaataacaagcttgttatcacatcaaaggtcaaccgggcttaatagctcctttaaaaaaagctagtctgctagcggcagagtccaggctaaccacattgcagaagtaaggcaggtcaacttgcacttttcttgggcagtaatcattctaggctagaaggaaaaacgatctgtgtgagcactggcaatatgacagggacagcaagctcactgcctaattgtgatccccaggaaggctctaactctattccacaggagtgtttctagtagcagaatgggaatgagtagagagacttttttttttttttttttttttgagacagagtttcactcttgttgcccaggctggagtacaatggcacgatcttggctcaccgcaacctccacctcccaggttcaagcgattcttctacctcagcctcccgagtggctgggattacaggcatgcgccaccatgcctggctaattttgtattttttagttgagacgaggtttctccatgttggtcaggctggtctcgaactcctgaccttatgtgatccgcccgcctcggcctcccaaagtgctgggattacaggcgtgagccaatgcgcccagccaggaatgagtggagagactttcttaagaggactgggcctccttcatctctagtgaccatccagcccaggcattttagaagtggcatatttgctagccccatcagcatagatcatataagaataatggaagtggtggaagtcagcaaaagaagtagaagcaattgtacaagaactagaaaccaaaagcatttccagaaagtcctttgacaaactaatgattctggtcttgtaacttgcctttttctcattttatcttttcaaattatgctttcttgtcattttcttcttcctgtatagatccacaatttgtacatcaaaaatgaaatttcactataaaacatcattattttggatattacagaatcaggccctggtatcccctgtttctgttctgccaagcaggaatgctccatcgtagtccaacctgtttcccaccctttcatgctcatgtcacaggacacattagtgtctcagggttgttggagctttctgacaggtaggacctggcataaaacctgcatctaagccatccacatcatgctcacaagtaacagtccaaatgttcaaatgtggtttcaaagaccctgggaatggaggaaaaataacaagaggtgttaggaaatatcacccatcaatcgattcccatctccacacaagatgcaatctcaacgagaggcataatgcatgtataattcatgcatacaaatttcctcagccaacccacatgctaccttcccttatttcagctgctcagttcatctgtggcagaataataagtcccagtggaggtagctctttgccttgcccatggtgggaatcaggtacaaagcagtgggggccagatctgtcttttgtggggatgctggagctcttgcccaagtgaatatgaaaccaacagtcagcctcaaggtcaacactgtgtgcgttcttcctgctgggccttccccagaaggctaggctactctcctaccatccctgaatgcacaggccatctattactttagctctatcagcttggtttctctgggccatctgcctgcctcgcctcacaaatgtgattatctattaatctgcaaagagtcaggaaaacatccaaccctcccttcttgagggaatttatatttctcatttgacccatgaacagacgttgatgagggttgtacatatgaatgatatgaaaaggctagttcttcacaagtactttctttgtcagttttatttatcaagcaaaagatgtagaaatatctctgtcctttgactactggtctgttccactggagaggccagcctgctcctcctgaccttaactttcttcctagcgttaatcagaatcagaatcccttccattctgattcatccagacacatggcccagtctgggtgcagtggctcatgcctgtaatccgagcacttgggaaggctgaggcgggtggatcacctgaggtcaggagctcgagaccagcctggccaacatggtgaaaccccatctttgctaaaaatacaaaaattagccaggcatggtgccagatacctgtaatcccagttacttgagaggctgaagtgggagaatcacttgaacccgggaggcatagattgcagtgagcccagattgcaccactgcactccagcctgggcaagagagtgagactcttatctcaaaaaaacaaaaaaacaatacagacacatggcccagccttagccaagttctcccatagtgagagaggaagtaaaaatgagacagaaatcctatttcaagaagatcagggtcttacaaggcctgccctgtgattaaccctgtcccaggaagcatatggctggccctgtgacgcctctctctctctttcttcctttgaagacatgccaagaggggctggcagtgcctgataccattttgttgaaatgggtctggctaggcagttggatgggcagactgcatcaccagtgggtttcaggggaacttcctccagccacccactcatgaccagctatgacataggcagagcaagcagagttgggggtgccttgtccacaaagagaaaaactgagacataaccaaaagtaaatgtgacataacataaagttttaagaagtctgtacttagcatgatgtttatttgttctgctgacatgtttgcaaagaaatttgctgccaaagggttactaatgcaataaacagttactgaatacctactgggcactgggcaacattagactgtttctcccaactaataaaagtgatccttcagaatcacacacttgatcaccaccccccccccatttaaaattatttggtggcacccatagcaatcactccttggtaacattggagtcagggtcagggtattccaaggcctgcccagtgattaaccctgtcccgggaagcatatggctggccctgtgatgcctctctctttcttcctttgaagacatgtcaagaggggctggcagtgccccctctgcccaactgcttctaccagttctctacacagacaccttctttccagctccaccttttcctgtcttgattgttgttgccctggttgtcacggtacccacatagattgcccttctccactcacaccataccataccagcctgacctaggtggacctttcaggacgtttttttaacatagctttttctaaaatcccatctcccaccttgctctctttcctgcgtaaggtttttcttcttcttccaagcttcttgcagcctgtacccttcccttggggctgccacaccacagtgtaattctcgctttgtttttcttctgcctccttgagtgcaatgccctgtgcctgtcccagggcctgatacagagaaggctcctaagatatgtttgtgctatatgtagctactgactccagggtggaggtggggggctacaagcaaagcatacatagagtgtgctcttctgtttgtggcagaacaaagaatacgtgtgccgtggccatgactacgagaggctggaggccttccagcagaggatgctcagtgagtttccgcaggctgtcgccatgcagcaccccaaccatcctgatgacgccatcctacagtgcgatgcccagtgtatcctttgatactgggtgggaggaggagggcaggggccctgggaggtgagatccacccagtcagctgcccctttaccacattgccaaccatacaggtttagatatcccatagtcctaaacctgagtgtgtcctcattgcttagcacacacttagcaaggcactaatacctcaaagaggaagcagtggcacgcccttagcagtgggtggtctagttatcagtggggcttcaggaaggcctttatccctcaggctggctgcttccaacagcttaatcctcaccctgccctatgaggagtctgcccaggcagccaggagcaatcactgtacagggtgacttggggtcctatcagggctcttgtcacagggataccacctgtgctgtgccctgctccactcccatgtgtactattgttgtcccttctcttcatcaggcggactggggcagggcccaaggatgtgtggagcaggagaagatgaggagttcctttggtttggtggcacttggaagtctgaatggaaacactgcccttcccctcacctttcacacacagcttccttggggaccacatgacagttgccatgactatggcaagcttgtttcagagaagggagggcaagtggactcttatctgctttttttccacaaaaatttcaaacagtattttatttaaaagttgttcttcagtaaatatgctttacctatagaggggaagcccagacccttgcagccttctttcactcccatggggtggatgcctgcattcccctctttccctttgtttcttaaaggggcaccagagaacacttggctgttgacatctcaccttggctgagtgctcatgaaactcaactactagagcagggagagggagagagcagatagagatttacctaactgagcttgggtctgatctgcccctagagatgccactgcctcccctactgggctgtcagtaaggagcagggactatggtgcacttctcccctttgaggagatgacaggggtcagcctctcaggcccagctctggcaagtctgtgtttctccttcacttcctgcccagacttgcagatctatgcagtgacgcccattccagattatgtggatgttctgcagatggatagggtaccagatcgagtcaagagcttctatcgcgtcaacaatgtgaggaagttccggtatgacaggccttttcacaaaggccccaaggacaaggagaatgaattcaaggtgaacaaatctaggaaaacgggcagtacacacagcaagtccaggggcaagctcaacttccttgggaactcaccactgttttatccctcaggtaggcagggtgtggcaaaacttgcctaactgcccatacctgcctgttccctccctacagagcctgtggattgaacgtaccacactgaccctgacccacagcttgcctggcatctctcggtggtttgaagtggagaggagggaactggtgagacatgtctcagatgaagctgagcttcacaactgctccatcagccccagctctgggggcccttctctaaggactaaagaaaaagagagcgtcggccacctgcctggccaaggctcccacaggtcaaccctgtgctaggatctttgtgtaccttctcttatctaatccatacaacacccctgagcagcaggtattttcaacctcctactttacatatgagaaaactattctctgagattcaagaaaccagagtgctctgatttcagaactagtgttcttcactatttgctgtacttccaagtgcctataaatcagacaacagaagtggaaagggtccagggagtctcaagttcacaggaacaaggaaggggaatcaataccacagatcttagaccccagctctcaggaagatgatgaggggttatcatcatttctgggatgactctgtgtgctgtgtgcccctaggtggaggtgagccctctggagaatgccatccaagtggttgagaataagaaccaggagctacgctccctgatcagccagtatcaacacaagcaggtgcatggcaacattaacctgctaagcatgtgcctgaatggtgtcattgatgcagctgtcaatggaggcattgcacgctatcaggaggtaagctgtggccacaggccaaacccatgcagccagcctggccaggaaggcggctcacaggcttctcttttcaagattatagtctccttaggtagccttccctacatgccctctcttgacatggtcctggaatgaggccctaagctccctatcactccctatttctttggcacagtttggtagggccttttcttcatttttattctctgaactctaagatgggtaatctgtaatcctgattatgggaggatgttaagtgccctccaagaggagccttggagcccagcccgtcaggagaagtgagttgtaggctggataagaggctagcccctactcccagtccaccagtcctgcctgccctacctaggccatccaggctccatgagggactggggtcagcatccagacttagatggcttggccacgttcagtccttctcagacaaaaaaacacacctctaattgccagaagttcaaacaggccagactggtgtatgtacctatgaggagacagcctggctgctttttaggtggcattagtggactcaagtctcctgggccccacttaagtagtagtcctgggaagagtcttcctgacttggcctttcctttcacaggccttctttgataaagattacatcaacaagcacccaggagatgctgagaagatcacccagctcaaggagcttatgcaggagcaggtatgtcttggagggcttgggaaccagcagccaggtgagaaaagccatgcactacaagatgagcagttctcaggggctactcatggttcacagagtggccttgtttgtgactctgataggttcatgtccttggagttgggctagcagttcatgagaagtttgtgcacccagaaatgcggcctctgcataagaagctaattgatcagttccagatgatgcgggccagtctctaccatgtaagttgatccctgtcctgcccctgctgcagtagaaccaggtgtcacttcctccagacctacgccacaaaccaaaggaaaataggagagagggagcctgggcaggggccggggttggggagagaggctgtcctccctacagagggacagggggcaaggatggatgctatatccaggggaaggatgctgaggatcctcccactcactcactcccaaaggaggagccagattcaagggcagggaacgtttttcagggcactgtgctagtagacaggttttcatatgtgaaggaagagagctaacatatatggcccacatgtagggatctttttggagatgtttttcatcccaagaacctaaagagataggcatggcctgagccagccttctctccccatctccctcctcctcctctctccctgtccttcttcattctttctcctccctctaatcgttctcttttccctctttttactcttcctcccaactcccttttctccctctgtctctccctccctcttattcccagcttcctctatcatgtctcgtgatccaagctcacatctgagatagcctaggatgagcagtactttcatgctagcagtccttaaaggagtcaagcaggtcctggggctggaccaggctcctgaaagtctccctaactctggcccagctcttcagcctccacagtagggtttggcccaaggacttaaacacacaaacaggacttatattccaggaccagtattccttggcagggtcttagaggaaatgctgactggctgaggatagagccccctattcacatatccaaacctcattttcaactgtggggctgactccaaatgttttctaaagatcccttcctgctaaacaggctggctcccagatcttaagggatatgagcccaattacctgctgctacctggcacccaagccaagttctcttctcatcacccaggaccactggacagaagtggcagggagacaagaagtagagctgttcaatgctgcacgaggttgtcatgagcaaaaaattccccctctagggataaccatggccacaggagccctgagggaggttgcactacttaaactcagtgggcctgacccatttggggcggacctgctgtgttcttggatgctgcaggttctggtcatctccgtccctccaggctcccagtgcaggtctcagcctgtgtggacaagtgtggacagcatgaaaagagaaaaagaagcttgttgtagtttgagaggtaggggcacattttccagaggaaagcctggagatcctgaaatttctccctctgttaggattctcccatggtatttcaaggtgaaatatgcagagaagctcttttacatctccgccttaaaattggagtgtccatttagttaagaacttgggcagtatcgctgagtctggtgggtattcattccactacctctcattccagggtctcctgcctgtttgactggtctctgctgtgtgcaaacttccccatcacagcaggtgacccaagcaggctggagcctggccagtgaggaggttctctgccatgtgggttgcagcaaaaagcacaaaacactttcctatatacatcacgttcttccgtgtgcacacatagcctttctccagctacagaaatacattttagccctctgtatgctttggaagaagcaggtggaaaacccggtgcttcttcacaccaagctcagaaatatccccagtggacttagggcccctgttcactacagcttttgaaggacgtgaggaaaccttaacagttgtttcctctgagttgtacacagggacacaaacaaacatgctgtcacccagtagggtttgagatcagaagtgtctgcccagaaatctacatacttaatatgaattaattaagctaaaatagagctgtgctatttttcagttacatacatcaggattttatgttctgtctccccgtagactgtgtcacagacaacccaggtcactaagagctgggccatttagcagtctaataaaacccaacaccaatccttatgtaattggtgcccacctattgacaactaataataagctcttcctctccttcttcccagatcttgttctacttattccgtagcgagaaaacctgttaacacactcctatgagctcagaccagcttcagtttattccagatgtgcttctcttaatgtggagtcaacctggggcctcgcacacggcctttggtctaggttccagtgcagttaggagggtgttttagtcgtgaagagggcattgcccaaaggaagtcagcagttcaggttcagccaaccatatgattcttttttgtttcttttacatttttgatcaccagtcagttattccctcacatcccttagttacttatttattctttactctctatgaaggggcattcatttctcaacaggagtttccaggtttggataagctaagtcctgcatgttcaggcaccagcaccccacggggaaatgttctggcatcccatagccccatgagtccggagagcatcaagatgacccaccggcacaggtatggccttagggctggggagggttccctctggagaggtgagtctaaattgtcaagggtcagaggaaagagtcctcatgtatactcatattccctcttacccatgcacacagcaaacacttatgtggctcctgccataggacccacaccctgcattcagtcagtcactatcctgggtaagagaagtgtatacatgatactgtgggaacatggaggagggggcatttggggtaagtcttgaaggataagtagatgtttgctaggggttaggagggtgatagggcaagatctaggaaaatcgactgacacatgcagaagcctcaagatatgaacaagccagcctggtcagcactctgagtagagccaagtggctggagtgccggattccagggcacggaaaggggataggatcagctctgagtgggccttgttcatgcaggcctttggacttgatcccaaggagaatgaggatcaccaagtcagttttaaggaagaaacagcatagtgatgtgaacatcaaagactggtttgcctgggctcaactgagaatactgaaagcctctaggccaggaaggccaagttggaggaggagactagtgagaggagcccctcacttaggcttgttttccagtgtgagcagcagctcagcacagagtgggcacttagtaaataagggacaaatgaatgagaagctttcctggtattgctagaggagagctattgacaagccttttggccacagatgtggaaggaggcctgcagatagttcacagccggctattttggtagcttcccacactaggaagaagcctctgaccaagaagcagatcccatcatggtgtgggggggttggggggtgggcactgacccagactaataccccatagaaaggggaacctgaggtctttgacctgatttggcatatctcttattcctcctgagaaactgctaatgtcatgcaactgagtggccataagccatgtagctgtaggtagaggcttgtccagtgtaccacaccattgtctctcccagaccaagggctcctgagtagcagggtacagctcaggactgctccaggcctcagatgggtatgagcattgactatggaaccctccaaaccggtggtagctgaaaccagggatgactattccacacattccgctctactgtccccctgccacctgccatgggcctgactcctccctatttcccactcttgctcacagccccatgaacttgatgggcacaggccgccattcatcatcctctctctcctcacatgcgtctagtgaagcaggaaacatggtgatgctgggtgacggctccatgggtgatgctcctgaggacctgtaccaccacatgcaggtacagagctgtccacggagagtgggccagggcaccatgcctacagaactcaccttgctgttgcaatgtctagtctgagggcttggcaaccctgcctaattctctagctcctgaattcagaacacccctcaccagagctagaaagctgccgttcctccacacaccatcctaagtctcggttcccaggccttatttcccaagaagaaaatccagcttcagtcctggttgctttaggagatcccacgggaaagatcctctgccagattgcccccttgcctggcattcctgttggcttagccctgcttcctccatggtcaccgtagtatggccagcccaacaacttcgctccatatgggtggtgtgggtggcccctagttgcccagccattagcctggcctccatcagggctcaggggatagcataaggcactggggcagaacacctcagggcatgaaaaagcaaactctgtgccagccctaaagtcctggccattcagacctctatcctgctgatttttctccctttgcagctcgcgtatcccaaccccaggtaccaaggctcagtcaccaacgtctctgttctgtcctcgtcccaggcaagcccttcttcctccagcctgagttccactcactcagcaccatcccagatgattacctctgccccttccagtgcccgaggtaaggatggcagggtgctacttgcagaatggagaagagaggtcttcatcaacgccactcggcttcctctcatctgtggctgtgtctttgagcagccctgtgacttagagaatactcatttgtgcttttaccactaaggactcgagagttcctgcctccaggcctcttccctggctggcttcagactccgctctgagcagtggctgccgctgtgccgccattgcatttctacctcagtcacaggacacacagcttagaagaaagctcacttctttcccattgaaagttttgctagaacaaagatcaaagtctaggcaaaagtgagtcttttgtcttgaggaatcaggcatgatgacaaagtatgaaaagtaaatcgggagactaaaattaaccctggaaaatgttattctaaaacaataacagcaaccaaaaaatttttcttcagttgggaaaggctttctcaggagagatggctctgtaaaaacctatttactttgccaattattagttgatttcttgttcagttgaatgaatattgttctttgagaggcagcatcttcgcatctttttcacgttctaatcctagttcccaagtgaaagttgattctgtccttgtagacagaaacatttgcagtggaatggaaattagctgtggtacataggatctagtgcttcccagggttggctttgcagggtagtgacagtggtctgagcttgccagccagtcacttgctcttgcttccaggcttcagaaggagggagtctctttgttcttctcattattatgaaaccaaagaaaaatatcacaaatttatttatttattttattatactttaagttctatggtacatgtgcacaacgtgcaggtttgttactatgtatacatgtgccatgttggtgtgctgcacccgttaactcgtcatttacattaggtatatctcctaatgctatccctccccacttcccccacctgacaacaggccccagtgtgtgatgttccccaccctgtgtccaagtgttctcattgttcagttctcacctatgagtgagaacatgcagtgtttggttttctgtccttgcaatagtttgctcagaatgatggattccagcttcatccatatccctacaaaggacatgaactcatccttttttatggcagcatagtattccatggtgtatatgtgccacattttcttaatccagtctgtcattgatggacacttgggttggttccaagtctttgctattgtgaatagtgccgcagtaaacatacatgtgcatgtgtctttatagtagcatgatttataatcctttgggtatatgtccagtaatgggatggctgggtcaaatggtatttctagttctagatccttgaggaatctccacactgtcttccacaatggttgaactagtttacagtcccaccaacagtgtaaaagtgttcctatttctctacatcctctccagcacctgttgtttcctgactttttaatgattgccattctaactggtgtgaaatggtatctcattgtggttttgatttgcatttctctgatggccagtgatgatgagcattttttcatgtgtctgttggctgcataaatgtcttcttttgagaagtgtctgttcatatcctttgcccactttttgatggggttgtttgatttttttattgtaaatttgtttaagttctttgtagattctggatactagccttttgtcagatgggtagattgtaaaaatattctcccattctgtaggttgccttttcactctcatggtagtttcttttgctgtgcagaagctctttagtttagatcccatttgtcaattttggcttttgttgccattgcttttggtgttttagtcatgaagtccttgcccatgcctatgtcctgaatggtattgcctaggttttcttctggggtttttatggttttaggctaacatttaagtctttaatccatcttaaattaatttttgtatgaggtgtaaggaagggatccagtttcagctttctacatatggctagccagttttcccagcaccatttattaaatagagaatctttccccattgcttgtttttgtcaggtttgtcaaagatcagatggttgtagatgtgtggtattatttttgagggttctattctgttccattggtctatatatctgttttggtaccagtaccatgctgttttggttactgtagccttgtagtatagtttgaagccagatagtatgatgcctccagctttgttctttttgcttaggattgtcttggcaatgcaggctcttttttggttccatatgaactttaaagtagttttttccaattctgtgaagaaagttattggtagcttgatggggatggcattgaatctataaattaccttggcagtatggccattttcacgatactgattcttcctatccatgagcatggaatgttggaacttccatttgtttgtgtcctcttttattttgttgagcagtggtttgtggttcttcttgaagaggtccttcacatcccttattagttggattcctaggtattttattctctttgaagcaatcgtgaatgggagttcactcctgatttggctctatgtttgtctgttattggtgtataggaatgcttgtgatttttgcacattgattttgtatcctgagactttgctgaagttgcttattagcttaaggagcttttgggctgagacagtggggttttctaaatatacaatcatgtcatctgcaaacagggacaatttgacttcctcttttcctaattgaataccctttatttctttctcctgcctgattgccctggccagaacttccaacactatgttgaataggagtggtgagagagggcatccctgtcctgtgccagtgttcaaagggaatgcttccagtttttgtccattcagtatgatattggctgtgggtttgtcataagtagctcttattattttgagatatgtcccatcaatacctagtttattgagagtttttagcatgaagggctgttgaattttgtcaaaggccttttctgcatctattgagatagtcatgtggtttttgtctttggttctgtttatatgatggattacgtttattgatctgcatatgttgaaccagccttgcatcccagggatgaagctcccttgattgtggtggataagctttttgatgtgctgctggattcagtttgccagtattttattgaggatttttgcattgatgttcatcagggatattggtctaaaattctctttttttgttgtgtctctgccagcctttgttatcaggatgatgttggcctcataaaatgaattagggaggattccctctttttcttttgattggaattgtttcagaaggaatggtaccagctcctctttgtacctctggtcgaattcggctgtgaatccatctggtcttggactttttttggttgggaggctattaattattgcctcaatttcagaaccagttattggtctattgagggattcaacttcttcctggtttagtcttgggagggtgtatgtgtccaggaatttatccatttcttctagattttctagtttgtttgcatagaggtgtttatagtattctctgatggtagtttgtatttctgtgggatcggtggtgatatcccctttatcattttttattgcatctatttgattcttctctcttttcttctttattagtcttgctagtggtctatcaattttgtttatcttttcaaaaaaaaccagctcctggattcatttatttttgaagggttttttgtatctctatctccttcagttctgctctgatcttagttatttcttgccttctgctagcttttgaatgtgtttgctcttgcttctctagttcttttaattgtgatgttagggtgtcaattttagatctttcctgctttctcttgtgggtatttagtgctataaatttccttctacacactgctttaaatgtgtcccagagattctggtatgttgtgtctttgttctcattggtttcaaagaatatctttatttctgccttcatttcgttatgtacccagtagtcattcaggagcaggttgttcagtttccatgtagttgagtggttttgagtgagtttcttaatcctgagttctagtttgattgcactgtggtctgaggcaccgtttgttataatttcttttcttttacatttcctgaggagtgctttacttccaattatgtggtcaattttggaataggtgtggtgtagtgctgagaagaatgtatattctgttgatttggggtggagagttctgtagatgtctattaggtccgtttggtgcagagctgagttcaattcctggatattcttgttaactttctgtctcattgatctgtctagtattaacagtgggctgttaaagtctcccattgttattgtgtgggggtctaagtctatttgtaggtctctaaggacttgctttatgaatctgggtgctcctgtattggatgcatatatatttaggatagttagctcttcttgttgaattgatccctttaccgttatgtaatggccttctttatctcttttgatctttgttggtttaaagtctgttttatcagagacgaggattgcaatccctgctttttttttgttttccatttgcttggtagatcttcctccatccctttcttttgagcctatgtgtgtttctgcatttgagatgggtctcctgaatacagcacactgatgggtcttgactctttatccaatttgccagtctgtgtcttttaactggagcagttagcccatttacatttaaggttaatattgttatgtgtgaatttgatcctgtcattatgatgttagctggttattttgctcgttagttgatgcagtttctttgtagcgttgatggtgtttacaatttggcatgtttttgcagtggctggtaccggttgttcctttccatgtttagtgcttccttcaggagctcttgtaaggtaggcctggtggtgacaaaatctctcagcatttgtttgtctgtaaaggattttatttctccttcacttatgaagcttagtttggctggatatgaaattctgggttaaaaattcttttctttaagaatgttgaatattggcccccactctcttctggcttgtagagtttctgctgagagatctgctgttagtctgatgggcttccctttgtgggtaacctgacctttctctctggtggccctcaacattttttccttcgtttcaactttggtgaatctgacaattatgtgtcttggagttgctcttcttgaggaatatctttgtggtgttctctgtatttcctgaatttgaatgttggcctgcctcggtaggttggggaagttctcctggataatatcctgaagagtgttttccaatttggttccattctccccatcatgaataggaacacaacgagtctgcagctcccagtgtgactgacacagaagacaggtgatttctgcatttccaactgaggtactgggttcatttcacaggggcttgtcagacactgggtgcagcccacggagcagggcggggcattgcctcacccaggaaatgcaaggggtcggggagttacctttcctagcaaagggaagccgtgacagatggtacctggaaaatcgggacactcccaccctaatactgcgcttttccagtggccttagcaaagggctcaccaggagattatatcctgcgcctgactcaggggatcccacacccatggagcctctctcactgctagcacagcagtctgagattgaactgcaaggaggcagtgaggctgtgggaggggcatccgccattgctgaggcttgagtaggtaaacaaagcggctgggaagctcgaactgggtggagcccactgcagctcaaggagggctgcctgcctctgtagcctccacctctgggggcagggcatagctgaacaaaaggcagcagaaacttctgcagacttaaacgtccctgtctgacagctttgaagagagtagtggttctcccagcatggagtttaagatctgagaacggacagactgcctcctcaagtgggtccctgaaccctcaggagcctaactgggaggcacctcccagtagggggcgactgacacctcatatggcagggtgcccctctgagacaaagcttccagagtgaaggatcagaaagcaacatttgctgttctgcagcgtccactgttgatacccaggcaaacagggtctggagtggacctccatcaaactccaacagacctgcagctgagggtcctgactgttagaaggaaaactaacaaacagaaaggacatgcacacaaaaaccccatctgtacgtcaccattatcaaagaccaaaggtagataaaaccacaaagatggggagaaaccaaagcagaaaagctgaaaattctaaaaatcagagcacttctcctccaaaggaacgcagctcctcgccagcaatggaacaaagctggatggagaatgactttgacaagttgagagaagaaggcttcagatgatcggtaatgacaaacttatccgagctaaaggaggatgtttgaacccattgcaaagaagctaaaaaccttgaaaaaagagtagatgaatggctaactagaataaacagtgtagagaagtccttaaatgacctgatggagctgaaaaccatggcatgagagtgacgtgatgcatgcacaagcttcagtagccgattcgatcaactggaagaaagggtatcagtgattgaagatcaaatgaatgaaaatgaagcgaaaagagaagtttagagaaaaaagagtaaaaagaaatgaacaaagcccccaagaaatatgggactatgtgaaaatctacgtctgattggtgtaatagcacaaatgtatgacttgggaagtcattaagaaaagaagctctctaaagcacacaaacccatgaagcccacagtaggagtgatggagagaagcccacagtaggagtgatggagagaagcccacagtaggagtgactgctgtatggcacagtgaaaagatgcagtgaccacctgggaaaagccttggcagattgtagagggaagtggagtaaggttgcagcaggcacagtcagacttcacctgaagtattcagaccaagccctcatttccagggcaagggaattaaggccacctagccagttcacagccaagctaagtttggggcacagatctttacactcaccagccctcactctcatgcccattccactgcccatattgcctccctagcatggactctgaggtcagaaaaggggagccagcatttgaaagcagacatttctagtactaaataggacaaatgaaccaaaagatcggtgcatgctgaagatttgtcagtatgtgaaagctgcagacatagagaaggagcagtgatatgtgttatcaagaaggcacactgaaagacggccttgggaataaaaagaaaagaaaccctgagccatgagtgccacagtcaaggttggcatttatagtgtcttcaggtaaatagtcctgaatagagctgcagaaacagtttctgtaatcccttctggttttgtttttttccctaacctaaagcgtctctaagatatgttctgacatatctaagactttatctggtattcttgctgaggacagatctctgaatcatgatgattgataaacacagaaggcaaccaaggatggacatttgaactcaaatgcactctgacattggtcagacacttcctctaggctgttccagatacttagtgtcctgaaaagaagaaagaggaggaataagcaggccctgctcttggggacctcacaggctggcggttaccaccttttccttccagccgttgactgatttattcacttatcaagcttttactgaatgctcagtgaggaacctgcatggctcttgccacgggggcaggtggtgcactatgtcagtgctgaatagagagaaattatcttcttgtctggaaataactcatttttacttcaaatggcttggttatctgttgctgcataataagccacccccaaaacttcttaaaacaatctattatcatctcttattctgtgggtttacagggctcactgagcaattctcacttggtgtcagatgtcactggctggaatcatctaaaagctcaggtgggctagatattcgagatggctcacatacatggctggcaattgatgctggtggtcagcttggggtgcgactggggctgtcaacttgagctcctacatatgacctttccatgtgacttaggcttctcacagcatggcagctgattttccccagagaaagcattccaagagacccaggaagaagcctcaaggctcgtttttacccagccttggatgtcccaggaagtccccacgtttctagtctcctcaagtcactaatgtcaacccagataccagaaagaggaatgagattacacctcatgttgtaaggaatggtgtgtgtgttttgggacagaaggtgttgatggtcaccatttttggagatgagctgtcacaatggccaaactccagaatatcacacagaggaaggctgagagaagccccttcccttttgggggtaaacattaagtgcaaaaataaacaaaatggttaaacagaactgggcccaaagagaacagtgacaagatcagaggcagtaagaaagaaagcaagtcccttctagaccacaacttccataccatccatgtgcaggctcatctggagaaaggtgcaggtcctacatctatcaagcacagtgttaggccctgggagacaaaatagaagggtctgtgtgacatggcatcatagagaaagactgatactttcaaatgtatgtaatagatgttgtagtagatacactctgggcaaagaagggaggaaacagtccactctgtttgaagtttgtgtttggtattaccagggaggggaaagctttcgtaaaggtgatcttgagggaagcctttgcattggggttacttcccccactcccaagagtggtcatgagaccagtggtcttccttgccatacccatggacactgctgtgattcctgttgctttggaaatgtctgagaggaatggcctgcaaggcccctcacacggatcaggatattgagtatgcagatgtggggttttctttatgagccaggctgtgagctccatgaggtgagagaccacggacaacctgagcaagacagtatacaaggttccaatcacatgcttggtgtggaatgggcattagatatgggtttgatgttactgagttggtctaaaggtgctgtgtgtttttcggtgcatactgaacagagagtagtcctgtctagagctgtgggctgcaatgctcaggaagcattctgagagtttcttgctgggaaagcactgtatcggtcaatgagaataggtgcttttttcacctaaactcttgtgagttgacagctccccctgctgatcaaaaggctgattggagctaggaaacagggattttgaataatccttaagtaattcgttgacactggggtttactagactacaactcacataattcagaagtcccatgaacacagaaacccttgtgttgttcaaatgttttcatgaaaagtaaccatcaccttctcctaccatgggattggctgcccagggcagagggcagggggagggaagtgaagtggtagagttaaaaattttagtggtggcacagagcacccctttgtggccaccatagcccagagagaccaccataacatgagtctgaatcttcagcagagcccctgagccctggctacagccttcaggctgctatatctccatcctaaccccctcacacggatcaggatattgagtatgcagatgtggggttttctttatgagccaggctgtgagctccacgaggtgagagaccacggacaacctgagcaagacagtataccaggttccaatcacatgcttggtgtggaatgggcattagatatgggtttgatgttactgagttggtctaaaggtgctgtgtgttttccggtgcatactgaacagagagtagtcctgtctagagctgtgggctgcaatgctcaggaagcattctgagagtttcttgctgggaaagcactatattggtcagtgagaataggtgcttttttcatttctctttacatagccatcttcttgaggttgcctaagagtacaggttctaaaagagaacatagaaaccagtaaaatcacaaaatagcaattcaggtcgagttttaaaaatcatattttagtcattctcttacaagtgaaaggacattttttaatgactgggtcttaaagccagccctgaggttctacaaacaggatcactcagaccaactgtggaaaaagttacattactggtatttattacgctgacttcttcaaagtattttagcctcatcttcttggactgaaatgaatacaagaggaatttctcaaggactcctttggcaagctggctgaagaagacgtatttttagctgtgtcctgacagtgctggcactgcacactcaaaggaaagccccagagaccctgagttccagagacacagagcctctaggagctgcagattgaccccagctgcagattcagctggagcccatgggttggtctaaactacccaacttcactcagaggacaccccagagaggggtttcaaccaatagagccaggcagaggcttgagatccaggtgatcctcctgtgagggctccgattcccccagtggtttctcatggatatgctggtatctggtacaatgagcacatttggagggccttccaaattacccattcccccaggaaagccagcaagttactcttattgcttctgtggaagatcttcttaaggaccatgggttgacaagttcctggacctacggctatggtctgaatccatggggacagagtcacaccacatgtggcatggtgtggcctccataacagtccctcagactaggggaaatcactgcagaggcctcacaggagtagaacatgaatcaagtcaactaaagagcctgagttaaagccccataatttccacattagttccatgaaccctgagttcacggaagggcaagtgtcacagagcaaaaccccggagagcaacctgtgtgcagagccctggcccccagccagcctggctctagggctgcagtaggactggcaggaaggcagaggccaggtgctgggacctagaatctggaagggagaagcctctgagaaaagtcggtagggagccaggtgagaacagggccagtggtgtcaggagaaggtaagtgcgtaaagacacagtatgtcaagtaataacagtgtggctatgttatctgagtgtctctgtctctgtgtgagtgtctccattgcaagctggcctgttcccatgcctggaccccaggagagcccagcatacaggccacacccatttcctgatagtgcttgatgcagggagcccctagccaccctgctccagttcttaactctcctcaccctctgcttctgagcatggtggggactctgtcagcggatctgcatctcaccagcctgctgtatgtcagccttggctgggacatgaggtgcagccactgccaccatctaacaaccagactctgcttcattcctcctgtgcttgctgagttcatcctcaccctaactgtaagggacacctaccctggttccctagtcctgaggatgcttgactgctggaccctccatctgtggcttgtcatctgtgcttgattgttctcacttggttacaggctctccctctctgccagataagtaccgccatgcccgtgaaatgatgttgttgctgcccacataccgggaccgcccaagcagtgccatgtatccagcagccatcctggagaacggacaggtaatagacccaccacactgactgtcctctgctgcaagtgtgttagcctgtgcttccctccttgcatttgcggggccttctgcattgtcctacatggctctctcattccgctgtaagatcccgcaaaaggccgctgggcttctggatgtggagtgcagtgaacctgaggaccagcaatccagacagagtgtaggcgtgagtagaatggtggcaggaaccaccattggaaccagcattgctcatgtagctatctgtccttcccgccagatcctggactcgtcatccctaaacagtctagcaaaggtaattggttctttgcagcctgttctgagaaggcagtggtggacacattggtctggaagatgttcttcctccctatttgtggggcatcctcactggaacaaactctgcctcttttattcatccatccaactgaagtccctcactacctgctggggctgttctacatgccatttgcacagctctccaaatgctctgcctggggaccttgaacaagaagctgtagggattaactccctcccttgggcagtctgtccctgcccttctatcagggtccataaaagtcacctctcagtgaccattacctagcctcagaatgccaggagtttcttagtggtacctccctgtgcctgattggctctgccaggtagagggatgagatctgcttggcagctgcccattaaaacagcaagtcctgtctgtgactctaggcttgatactgtcctttcctctgccttcagtgctagcatgggcctgtgcagggcctctccaggaggctaaacctgtcagtgctcatggggaagtggggatctctctagccagacaaaaggatgcaaacagatgctcccaggtagctatgttctgtttcttgggccctacataagacagctgggtcctagccagatactggaggatggtattgcaaatattgtgtatagaagcactgagaaccagacaccctggacagtctttcctagggctggcctgggggtctcagtatatctcaagtgtgagctgtgccactgctttgttttccccgtctgatcttgtagtgtcctgtctctcgtcgcccacaacactgcctcccaagatataattggttgttttcactctctgtaatgtttatctccttccttcagccgccgaatttccagcgagccctgttccagcaagtggtcggagcctgcaaaccctgcagtgatcccaatctgtctgtggctgaaaaaggtattgttgcccaggtggccttccccccatgtctgtccccatcctgagtgtctgactcttgtccctgagtaccagctggccagggctaagccatacttcaacactcaggtctgtccgtctgtccagaattctgaccagttcttgtgctcactatttaacccatgtctgacttgatgctaaggtttatatcctgtatccctccttcctcagggcctaccctcagaggtcccaactgcctcctgccctgagcccacctttatggaaacttgggcttctgtgtgcaaactgtagaaaactacttccctagactcctcccagccacccccagaattcagcaggccttgtggcccctttggtccctctcagcttgggccctcagggatctttccttggagctcagaacaggccgtggccaaacaagccccaagaggaaggggaaagacatgctatttcccaaagacaggcttctccaagtgaagcccagggtgccccaaaggagtccggtccttctgtagccactctggccagcagctgctgtgaatccatcttttattgcaaggccaccaaccatactgtgagactgagcaatcctccttagacctgtggctgtttagagagtgggcattttaccctgtgttctgcttctgcaagccgatggaagaagcagactcagacctcagacacggagatctgagttaattttaacagagagtaatactaagtgctgagccttcctgccacccagaacctggcctcatatccgcccctctcctcacaggttctctgcctagctgctccatctattggagtttagggcacactcagttcccaccaatacaacctgtcatcccctttccatcagaacatgtccctccaaagctgtcatcatcacgttatcatcgtatctgttcatcgagtgctatgtgctgtccccactgttatgctccgcctttgctcatcatggaggacatacctctgtgtcctctttaaagagacaaaacactgatgggcactgaagctgggtgccccaccacaaagggcctggagactggctgaagatgccttcatagcttcaaggtcgtatatcccgaaaacatgcagcttcttggacttctgcacctgtgacccaaaacagagtgcccttttcgcctggagggccagaatccacagtggcatttcttcagctgagatgcagagcaacgtcagaagtagccaagagtctagacaggcttagagctcaaacaggtgctggtggccagaccaggaccctaccccaaccagacacattagcgcttcaggcctcaggccaaggccagactacgactacatcaaggagctggacatgcccacccctaggtgtggaaggaaaggagggttgtctcagaacagaggctgagcccagagcaagcatatccgtaccacaaggccagcatttagaaggcagctaatcagacatttgcccagtggcaacacacaggccagagcgtagctccctaagtctctacctggatcctccagggcaggaactatacatacttgtcatcattctcttgtctgtcagggttctgagtcccatgaggactacatctctcacttacaggtatctctttttgccgtgcagtgactcccagatcaggtgagcctgccttcaggaccatgggctatgcactggcggcctcaggccagtgctggacagttgttaatggtgagggagggaggcgacaggatacagttgggatcacccttcttttcctaggataagtcattctgtattagccttccctctagccccagtgcatttatgctacatggcaaaggtctactggccccactgctcacagacatcaggctgcagggcaaacttgatggcttctggtttatatggagtcactcaggcaggcacccttttgtaaaccattaaagccctgtaagccttcttctcccatagccttcctgccctagagctcctttgagcccttgtgggtgaacatctgcaccccataattcttccagggctaggtgtgcatctgagatcctgggctgtcagaacccctttagggaagccgcccagacccatttctaagcttcctattccctgatatttctttggtggctttttatggagaaggtgatttttttggcagagaggggaaggtacagggagcctcaacaccaagaagctcatgctgcatcttgtagggagcatgggtgagtgggcctgttcttgggatggctcaggctctctaaggaggctatttggtgaaatccacctgatgctcatcagatgcagaattctttcctcctttcaggcaacagctaagtgtcttgcctgcaactcaatcactggcacacccctccttcctgccgccagctatcaaccataccaggagacggggcaattctcagaactgaggctgtttagacagtggagttttaccctgcgttctgctgcaagctcacgccagttcctgcgcaatgaggaagaagaggatgatggatgtcacagtcttatccctggacagctgagggggcccagcccctctggccacatccttttcaaaggacagactctagctccttcccttccaaagcctgtcagctcccattaggccctgaaattcccatctctgtgtctaggccaggaagaaaccaaacctcagccacctcaggctcaatgtagctaccacggccttagaacaaatccagtgacagcacctggattgtgagccgcttctctgctgctaatagcccaaaggggagagttgcctggctccaacagagaaaggacatatttctttttgctggtatttgttctctaggaggagctggccaaaagaattctccagccatcattcctctctcctcctgaaaagtctgtcatcccaactgtggctgaggggacagtattctggcagtggactccttctttaacacagaagggcactctgtgcttccctttttcctgggcccactgcacccctgcatccatggcatgtgggtgctaggaactggggttctgtagacgccaaagggtactcatcggctccacagccctccctcctcctgttaggaagcagtgggtccagctggatctgggctgcagtttcttccaacaggtacctgtccttgctccctgcttttcccactgagcctgggcagtaggagagctgactctagactttggcaaggagctctatgtcctgtgctctctctatattctctcattctcatctctactcttctgtcctgttttctcttctcctcctggcagatcccagaggctgcaggcgttcactccttgctgcacattcagctatctcatcctgaatactctttagacataaactcactctgttgccctcctcttaagcagcttcaatccctggccactctcccctgtggaccacagtgccttgcttggccagcgtttttagttccaggtgctggcatgccccacatgtgtgctggatacgtggtgcacactggagaagccacaagctgtacttctcccagagggtggctcaagaagtaacctcccttcatgccatctgtttccacccttcagctgtgccagcagcccccagcagctggagtctggatagcggagcccaagaggcccagcccttcctgtctgcccatatggggcgcatcctggcccccccagtgcctccccgaagcctgctgcatggtaagaagacctccagcgggtcccccgatagtccctggtctcagactctgctcaagggccacagcaacagccatctaagctgagaagatgggccattctctgggccgactcagccaaagccaaaacacccccaccacaggaaggatcctgctgggctttggggtcagtgaggtttccgagtacagcaggttagctcaggaaggccatcccaaccagaaggctgaagacaatggaattgactgtgccaggcacacttctcaccagactgtctcatcgcctagcagtgggctagagctgccgctgcctgaggcctgttccacagactctgaagcactcaacttctctgacttcctgtgtggagtgagtttcttttaccccagcagcctgtgttttggagaaggccagtgtaaagagaggtttatccatagccctcaatgctgaggggtccccaggggactcttctcatgcctgcccagttggcccagcaagatggtgctggcatgaagtctgtgcagggcccccagctgaggctctggttctgttccctttgcaggtcattactccctacactttgacgccttccaccaccctctgggtgatacccccccagccctccctgcccggaccctgcgcaaggtaatgtactgaagcggcagccccaccaggctgtgagatgagtcatctcgtctgctctagaaccacccttggggtctacaggaggaactggagccctccccttcacctctctccccagcctggcagaagctgggggtggccagagccacacttgagctgcaggtgcacatttgtgtcctgcagcaaatgtgatgggggcagggagatcagagggtcctggagacaacaacacacagtaccaagagtgtgtgggcagtgagcactgggaaacctgggggctctcagccagcaccaaggtatcaacacactgtagttcgctagctaaacaaatgttcctgtggtggatcagagagcatttcaaactagaattcagtaaaagcaagaactttatgaaaaactcaggagagtaaaatttcctacctgttagcttgtctgcaaattggaaaagactgagtctatcacagattttagcagcagaatacattcctctggtccacggcccaccagggttctttctgcccctcctcaacaggcctgatgacccagcctttatgtcagtatcccagagccaccgacggcagcctgggacctgggaccagggggcaccaatgcccagcagccagggcagggcaattttttggccacagaaatgcagatgattctggagttccactggcttaggggtggtgggaggagctgggagcttgctgctgaagaaacaagaaacatgctgttgatgagggttaaagttcattcataagcaggctcttggtcttcctatggcgggcaagtcagcctgtctggagagagggattctaacatgcccaccctttccttcgcagtctcctctccaccctatcccagcctcccccacaagcccccagtcaggtctggacggcagcaactctacgctgtccggcagtgccagcagcggcgtgtcctccttgagtgagagtaactttgggcactcctcggaggccccacctcgcactgacaccatggactccatgccaagtcaggcctggaatgctgacgaagatcttgagccaccctacctccctgtccactacagcctctctgagtctgccgtcctggactccatcaaggcccagccatgccgaagccactcagccccagggtgcgtcatccctcaggaccccatggacccgcctgcgctgccgcccaagccctaccacccccgcctgccggccctggagcacgatgagggggtgctgctgcgtgaagagactgagaggcctcgaggcctgcaccgcaaggctccattgcctcctgggagcgctaaggaggagcaggcccgcatggcctgggagcacggccgaggggagcagtgaggggcaacgaggcggctgggatgccgccctcagtaagcagcttgccaatcactccaggtctgaaaagcaagtcccccagccccaccccagggagccagagaggcttgcactcaggagagaaccacccccaagtctccgttctactgccgtgaactcatgtgttgccatgtacagaggccacagcagcatgaagggttgtggcttccctttttatttttttacatttccatttctatgggttttcctttctttcctttatgcagtagatgctttcttcctcctgcagttctggaccatgtggagctacatggagaaattgcacagacagaatcactttgccacactgcagggcccaggagtgggagcccaggccctccctccagggtagagatgcaccgaatggaaattgcactaaggacctcttcctttgctgtatggacagaagagttcatggttgcattcagggattgcaaggaccatatagacatgtcacaggtggaaaaagggccacaagccgttttgcacaaatgcctgcccacctgcccctcttccatccaggagtgtgctactgaggggctggctggaccaacctgctggctcaggcatgtgactggcctaactgcatgcccagggcactgccagggttcaatgggccagccgtctcctactccaccttggatttttctctccatcacatcatttctgaccatttgctcccttccattcttgaaacacctcatgccccacaggagccccagtggtgactggatctgcaagggttatctcccgccctctggggtttgagtggaggtatggagccagagaggctatcctagctaccttcctcctagggggagctggtccccttcctatgtggtagagagactggtgtaagagtgtggggtgtggcaggcgccggaaatcctcaaagctttcagaagcatccagaatgcctaccatcagctcctgaatcagggattttcagcactacctctgagccatggggttggctgcccagccaggcttccaggccctgaggacatgtggtcaggttcagcaggctcctgggtaaagagggtgggagggggcttctccttttggaagcagatagccatgcaggtagaattgtcatctcccaagtggccacatacagcaacccactccaggccatggggaccaccactcagggttcggggctggcaggagggtagtttctccagtctccccagtctgttggtgtctttataggaaactataaagcagagcagtggtgtctttagaggaaactcattcaagtcagggcactgattttcctctcagtttattatttggggggatagggtcaggtgggtatagtagtactttaccagggtgcttttaagttactttaaaaaaagcctacaaaatattttttttcttttatttgctcgagttcacattaatgatggtcacaaggctgccttgttgggcaggcgtattgcccccagttcctcttctgctggcctgtatgacctccacagccaggccctgggcccaagccccttgtcccttctccactgcccctctttccagacagtaaaggccatggtcagtgtgtttttctcttgtaaacaaaccccagcttgtttaacagaaatgctaataacctactgggaaagatggaggtctaaattacctccagggtttttctgggggtttatcaccagtgtgggtcccttctgataccaccaggttcactccaggcagagtggggcggaaggctgctgaggatatgggtcagttacagcagccctcacctcaaagggctggcctgcttctcagcctacattcatttgcaagcttcaatctctggaccatctggtgttcacaggtgttagagggttaggggttaggggctagttttggatttgattcataggtaggagggcttagattttaaggcacttctgaaagtcaatccctggacaaggcagtcatcacataagaacagctaccttctccacttggtggcacaagaggtagggaggggagtatgggttcatttggcttcgcattatgcaaggtgaaaccgtttgttttccctctccattttccctaactaaatgaaaaggacacattctgaaatcccttttgttggagaataagtcagtctgaggggaaatgggaggccagagatgagaaccctttgaaaagattgtaaaatactgattttcattctttcaagcttatttgtaaatacctatttgaatgctgtgtatttgtacaggaatttgagcaaaaaatgtatagagtgtgatgtccaattggtattcagcactataaatgtgtttttaacctcccgcattctgtgcttatttaaaacaaggaaacttctaaccatttcttttgtgtattcatgtttaaagaaaaaaagtgatttaaaaatgatcttacctgtaccagaaaagcaaagttaaaggaaacaaaatttgtaccattgtcccaagaggtattttactgtatatattgtggtagcatgttcaaaatccaacaagtaatgtgaattttagatgtaaatatctgccacttgattttttttccccctttccccacttccttgactgctgtgatgtgaattaaagataaatacgtgatactgatccactgaattcactgaatgggagcagaggatgtgcccctctccaacccttgtcgccgggctccaagccctttttagccctatagacatgtcctttttgcactgagtagagccaacggttcccgcatcctgccttgaaggcaggcagccaggagggcacttgaaaggagggcagtcgaaaaggaaacatcctccagtgcttctctggtgattcccgggaccccactcaggaggtcccacggcagcgggggaccccgagggcctagccggggaggcaggaggaggctggccagccaccaagccacgattcagagcttgtaagggcacctcccgagcccctcaccttcccactctgaggcgaccccatgtcctcgaccgatgatctggcccgggcgcttccctccacggtctagagtggcggcccagctttgagcttggcgcgccttgagcccttccttcagatgtcccgcagtccgtccaccccgcacgtctcctatcagcctatgcacggcgggctccggtcaggtggaggatcagcaggtgggctttcaaaggttggatccgttgcccacgcgaatgaaagaagaaaaaagaaacctctttgagccttgcctgcggccgcccgcccttcctgcctaacctgttgtcttggctgaccccagaactcctgcaccacgagtcggagtccgggcgaggagatcagcaggggttttcgagggagcctggggcccagggcaggggtacgcgggtcaactcaacagatgtaaggcgtggccgaaccccattcagctagcagtacccagcctcagccacagtcgctgcccttacccaagatggcggcccacaccgcttccgtcgctgctgtagtcgcttcctgcggccagcccgggttcaatcagcggccgacaactgtctagggctcagacaccaccagccaatgagggagggcagcgtggagccgcccgtctgggctcgcggctcctggaccaatggggaagtggcatgtgggagggcgccggggggccccccgccaatggggagctacggcgcgcggccgggacttggaggcggtgcggcgcggcgggtgcggttcactcggtcggcggcggcancggaggaggaggaggaggaggaggaggaggaggatgaggaggatgtgggccacgcaggggctggcggtggcgctggctctgagcgtgctgccgggcagccgggcgctgcggccgggcgactgcgaaggtgcgggatagggggccgggggccgcgctccgtgaccgttctggcggcggcgctgaaccccacaacatcaccagacggccggggccaagagggcgagggcgggggcgggggcgggggcgacagcaggtccccgcggggcctgcatgaggaggctccggcgcccgccctagtaaatctttcttgggcctagaaaacattggtccgacgaagaaaagttgagactagatcccgttgaaaacttgtcctgaaatctccatcactcctgagttattgtccccaccaccatctagaggttaccgctccccgttcggcgtcgggagctccagggctggccgtgggtgctgcgccctgtctgttgggatcacgaagctgcacctctgggtccgctgttgtatttggaaattagcagcagcattttgatcatttttctcttcaccttccagtctctccatttatgaggtcacagtgagtcccgtctcaaggacacgtgttcaccatgggcttaaacttgatgaaaggagcagggagaagtcgtttataggtcattgggtgatgcttggtcctttgatgccctgggtgtaccaggggacccccgccacttggaaccgggttctgtctacctgtagacacctgagaaaaatcggtgatggaaaagctcacctctaatgattcatctccgtgtctcctattaaaattgctggcggagttcttttctggtggattggaacagcttggtgattgctgagcatctcccgtccctctcttttccagtttgtatttcttatctgggaagattttaccaggacctcaaagacagagatgtcacattctcaccagccactattgaaaacgaacttataaagttctgccgggaagcaagaggcaaagagaatcggttggtaagtagctggtgatcctccccaactggccctggctcatgttaaccctcggcttcaccagccgtttgataaaaggccttgcccacctctctgttcaggaagccagctactctctccataaactaatgtgagaagactgaagtgcttctatgtccttcccaaagcagcatgtgttctgcaactgtgatttttttttatcctgttagtctttattaagcacctactatgtgctaggcactgggaatatcaggggaaagaagtgacagtcggacacacaaataatgcaatgtctgggtgtcatgaagaaaatggaccagcaggtgctgatttagagtggccaagaagtctctgaggaagggttatcattgaagtggggtaagaccatcccatacagggaacagcagtgtgagtgcccagaggcctgaaagagtgtggcatgtatgtggacaggagaaggtgacagggtgcctacaggataggcaagggccgaatccaagacaaaagccctagtgaagcaatgggttttctaacttgaatttctctgacagtctctggcttttctctctgttaaaggtttgaaccctggtgacacttaaattcatttggtggctgtcagcttggactgagcatgtgttaagagtccagggtttacactggctgaatctgactaccagtacaggcagggcaccgaaaaatgccgctgtgggccaggtgcggtggctcatgcctgtcttcctagcactttgggaggccaaggtgggaggattgcttgaacttaggagtttgagatcagcctgggcaaagtggtgaaatcctgtctgcacaaaaaaatttttaggctaggcgtggtggctcacacctgtaatctcagcactttgggagaccgaggtgggtggatcacctgaggtcaggagttcaagaccagcctggccaacatggcaaaactctatctctactaaaaaatacaaaaattagccaggcatggtgacaggcgcctgtaatcccagctgctcaggaggctgaggcagggagaattgcttgaacctgggaggcggaggttgcagtgagccgagccaagattgcgccactgcactccagcctgggtgacagagcaaaactttatctcaaaaaaaaaaaaaaattgttttagttagctgggtgtggtggcccacaccggtagacccagctactagggtggctgagaggggaggatcaccacccaacagattgaagctgcagggagccgtgatcatgccactgcattccagcctgggtgacagggagccctatctcaaaacacaagtaaggccctacagagagatgatgtttcaaggtgtcagtatgtttggaggagatggctctcaagcacctcctgaaggccattgtcctttattgctccagtgctactatatcggggccacagatgatgcagccaccaaaatcatcaatgaggtatcaaagcctctggcccaccacatccctgtggagaagatctgtgagaagcttaagaagaaggacagccagatatgtgagcttaagtatggtgagtatgcctagtcctttcttaatgaatgctgtgcaccttctgggtttgtttcccatctgggagaggaaaatgatgagctagagtcatgagtgggttgtattgtatgacagatggtgctaaatgctggagggctctggcatggaagtgggtggaggtcagaataggccttattgaagaagtgatatttcagcaaactttgaaggaggtgaggattagccaagaggccagctaatggaagaggatacaggcaggataaaggtgtccagtggcatggcaagtcagagagcattgcaggctggtgagggcttttaatctgcgtgaagttaggagcattaggagtttttcagcagagaagggacatagtacgacttgggtttaacaggctggttctggctgcaagctctgaagccccagtgatttttactattctgaaaagaaacactatgtccaagcatgcaagcccaagagttaggaactacagcatctctcttgctgactgggtctctggtgtacatagtcccagtcttcagaaacagtcagggcctcttctgaaaaacttgaatggccaaggacctgtgttcacctacttgcgtcttcctggtacaggtccagttggctccaggtcactgtggtcatggagagtaagttcctaactcaaaggcctgagcagggctgctctttggcaccagcctggagttgttagtatgtggtgactatgtcagaggcacttggaagatgggaaccatgtttctcctataaggacagtgtggcctctgtccctatccttgttcacgctgcatatctgtagtagacataatatgtagccagccttcctggtgaagaggctagttccctcttgtgggggcagtaggcactgacatgcctgtaaatgtgtctggaaatgtctcttcctctgaaaccagtagggctggtttggccgttcagggagtgacatactctgggactactgggggactgcaggtgctccacccagtcagtgactctccctgctctctcctccagacaagcagatcgacctgagcacagtggacctgaagaagctccgagttaaagagctgaagaagattctggatgactggggggagacatgcaaaggctgtgcagaaaagtctgactacatccggaagataaatgaactgatgcctaaatatgcccccaaggcagccagtgcacggaccgatttgtagtctgctcaatctctgttgcacctgagggggaaaaaacagttcaactgcttactcccaaaacagcctttttgtaatttattttttaagtgggctcctgacaatactgtatcagatgtgaagcctggagctttcctgatgatgctggccctacagtacccccatgaggggattcccttccttctgttgctggtgtactctaggacttcaaagtgtgtctgggatttttttattaaagaaaaaaaatttctagctgtccttgcagaattatagtgaataccaaaatggggttttgccccaggaggctcctaccagtttctgctttccagttgcagagtttggggggttattcattcccatttatctctcaacccaccagtgctgaaaataccagagcaggacataggggctggggccagctgatgtgtgtgggtgtgtaccactagagggcagcaggcactcagcagaaaggaggtggcgggggcggggggtgctgcgcttgataccctgccccttgatacagtatctgtcttacccgcccaagagagctggaggccacagctctaggaggagtgagtctgggatacattggagggccttatattgtggctcagtacaagcaagacagggtgtctggagtgtggtttttccacaaggatatcttcaatcagtgcacgtcagcactgacatctctataaagatgctgttggcctggccacctacttgctcttttgtccattccaagcctctgatgtctgttccagtttttgcaagtctggcaggagtcagcttatacaaagagggagtgggaagctgccttttgcctttgtttaccctagattagtctaacagttgaggtccagggttttgctggagtctgcttcttaagccactctctgtggcactggtgcttaggaaacccagttgttagtgtgagctgtggctcaatgaagacacctgtagaaaccacctgaaaggacggactaagaaccagtgctttccaagtaattggtcttgcctcagatcacttcacttgtgtctcctaagctcagtttgcctgtaggaggccttgctgctgtggaacccattgctttcttccaagacctttccccctgcacctgcctgagctactccaggagctgctttctctttgtgcgaagagggcatgacttggtctgctcttccccatcgcaaggattctgtgccagaaattgggtcaggttctaccatggctccagcaactgtccttggagaatgaaagcttcctcaatgggcttgagcacctgggcaccctttccctcacctcacctggggagaagaggtcgtcctgaaggtgatgaacaggagggtactggccagcgaggggtcagcgtggcaaggtgtgataactgctggcactatctgtgcatatggcctcttcatccttggctcttacggccctacctttccagcctgctatctgcccacagaagagggtgggacccaagagtggcgttaaagagtctattccaactccatcaactgcaactgcaggcttgtctctgctttcggttattacctgcgtgacagcaattgtcctcacggccttttcggggactgctgcaggtgaacctgcacgtggagaatgcgcagaatgtgggccttgggtcctgggcagggtctaaggataggcatgcattagtccttggcgccgtcaacgccggatcccaggcaggagatgccaacgagggtgatgtggggtttgctcaagcctagtcctaggactgaggggatactacataaagagaccactgactgggtcaatgccccagatcccaacggccatggaagctgccactcctgctccaatcagcgcgggctccagtgcctgcaagaggagatagctggacccagagcggcaaagcacggctgggagcacaaagcgttaggtcgtctcgccggcctctcagggttcactacactccgcgtagcctcaagcatcggccatgcgggccgcgcggtggcgccagagcgcgcggccggtcccactcacccagcactcacagggtcacctggcactgggcgacgcagcgcgatgaggcaggcccggcgcgggtcttgctccgcccgccgcagagtcacgtggcaggacggcgcaccttgataacgcaatgcccggcccctcggcgccgctcccgccccgccccgccgccaccgccgcgccgagtccttttgtccaagatggcggcgccgggggcgctgcctcctcggccgccgcctccgccgccgccgctgtgagaaacctacgggccgcccgcccgccgcgccagcgccatgaagcggcagagcgagcgagactctagcccgagcgggcgcggctcgtcatcgtccgccaagcgtccgcgggagcgcgaacgggaggcggaggcgggcgggcggcgggcggcgcacaaggcctctggcggcgccaagcacccggttccagcgcgggcccgcgacaaaccccgcggcagcggaagcggcgggggcgggcatcgcgacggccgcggcaccggggacgcgaatcaccgcgcgagtagcgggcgctcctcgggctccggcgctggcggcgggggacgcggcggcaaggcctcgggggacccgggcgcctccggcatgtcgccccgcgcgtctcctctgccgccgcctccgccaccgcctggggccgagcccgcgtgtcccggctcatccgcggccgcgcctgagtacaagacgttgctcatcagcagcttgagccccgcgctgcccgccgagcacctcgaggaccggctcttccaccagttcaagcgcttcggcgagatcagcctccgcctgtcgcacacgcctgagctgggccgtgtggcctacgtgaatttccggcacccacaggacgcacgcgaggcccgccagcacgccctggcccggcagctgctgctctacgaccgcccgctcaaggtagagcccgtgtacctgcgtggcggcggcgggagcagtcggcgaagtagcagcagcagcgccgccgcttccacgcctcccccagggccgcccgcgcccgccgacccgctcggctacctcccgctacacggaggctaccagtacaagcagcgctcgctgtcccccgtcgctgccccgcccctgcgggagccccgtgcccgtcacgccgccgcagccttcgccctggatgccgctgctgccgccgccgtgggactgtcccgggagcgggccctggactactacgggctgtacgacgaccgtgggcgcccctatggctacccagctgtgtgtgaggaggacctgatgcccgaggatgaccagcgggccacgcgcaacctcttcattggtaacctggaccacagcgtatctgaggtggagctgcgaagggccttcgagaaatatggcatcatcgaggaggtggtcatcaagaggcctgcccgtggccagggcggtgcctatgccttcctcaagttccagaacctggacatggcccatagggctaaggtggccatgtcgggccgagtgattggtcgcaaccccattaagataggctatggcaaggccaaccccaccactcgtctctgggtgggtggcctgggacctaacacgtcactggcggctctggcccgagagtttgaccgctttgggagcattcggaccattgatcacgtcaaaggagatagctttgcctatattcagtacgagagcttggacgcagcccaggccgcctgtgctaaaatgaggggttttcccttgggtggaccagaccgcaggctccgcgtggattttgccaaagcagaggagactcggtacccccagcagtaccagccctcgccactccctgtgcattatgagctgctcacagatggatacacccggcaccgcaacctggacgccgacctggtgcgggacaggacgcccccacaccttctgtactcagaccgagaccggacttttttggaaggggactggaccagccccagtaaaagctctgaccgccgaaacagccttgagggctacagtcgctcagtgcgcagccggagtggtgagcgttggggggcagatggagaccgtggtttgcccaagccctgggaagagaggcggaaacggagaagcctttccagtgaccgtgggaggacaacccattcaccatatgaggaacggagtaggaccaagggcagtgggcagcagtcagagcggggctccgaccgcacccctgagcgcagccgcaaggagaaccactccagtgaagggaccaaggagtccagcagcaactccctcagcaacagcagacatggggctgaggaacggggccaccaccaccaccaccacgaggctgcagactcttcccacgggaagaaggcaagagacagcgagcgcaatcaccggaccacagaggccgagcccaagcctctggaagagccaaaacacgagaccaaaaagctgaagaatctttcagagtacgctcagacactacagctgggttggaatgggcttctggtgttgaaaaacagctgcttccccacgtctatgcatatcctagagggggaccagggggtgatcagcagtctcctcaaagaccacacttctgggagcaagctgacccagctgaagatcgcccagcgccttcgactggaccagcccaagcttgacgaggtcacacgacgcatcaagcaggggagccccaacggctatgcggtcctcttagccacccaggcaacccccagtgggcttggcactgaggggatgcccacagtagagcccggtctgcagaggcggcttctcaggaacctggtctcctacttgaaacagaagcaggccgcaggggtgatcagcttgccagtgggggggtccaagggcagagacggcacaggcatgctctacgccttcccaccctgcgacttttcccagcagtacctccagtcagcactaaggacattgggcaagctagaagaagaacacatggtgatagtcatcgtcagagacactgcctagcccaagcctgtctttcccagcgtcatgtttgtgtcacaaaagcagttattttaaaatctgatcccctctctaccctaccactttggtttgaattatctcctgggttattttggttcatttgggtggggatcaaagtcctgtccaccaccaaaactaagttcttagattttgggggatttttttttttaaacgatgagaagggaatccggttatgttgatttctagtgtacaagatactgtctgctgtggttctgtatttttttattttttgaccaactgtatggaaagttgtcagtaaaacctttgacagaggatggatttttaaacctgttcagagtcctggtttaatcaatcaagctaaaagaatcgaagacatccctagtgcatgtacacgaatgccctacgtcatccttccagcaccactgctgcatgggtcactctcggcctctcaattcttcaggctcagtctggactctacttacactcatttttatcttggctgacagcaggcaagcttcagtttgggctgtggacgctgccacacaagcctgagtagagcccatgcaaaggaagggatggggtgagcgcaaggcctgtggtcagcagctactgatggttttttctgccttaaaccgtgtgtgtgtccatcatcatcagtttgagctgtggctgtttgtttgggacagagtgcccactcagcatgtttggcagcaggtagccttcagcagctgtgtagtcttgtacaaggagaagctgtgcactgttgatgccagggggtctcggggcccctgatctgtccaggctcctggttcggcctactttctagcctcactcagcccagggatagccagtgttgggagacagagttgcctcaggttcccaggggcccgggagtccaaatactggaatggagggttggaggcagccttccttggatttactcatgaactttgcctagttgtttgtgatttttggctttctctggtcgttcaggggtgatgggtaatagagcaggcccgtgtccagtcatacctagagatttgtggggggatactgaacctctagactgaagtacttaccggggagcacagtggactaggggatgcccttgataatgacggtttcctaggtgcaagatcagagcatgtgcctacaccttgtgccctgatgccgaggtggagaccattgggaaataattaatagatatttttctggggggaaatcacaagtcactgaggtgtttgtttgtttgttaggcagtgctagagcttgaagccactcaagccagttggggaggaaagggatgcggaggtaccctctagctgggaagaagggtgagattccgtcttcttccctgtctcaagtaagtaaggaaggtactgcggacagtgtgggccagggaggaaaaccagagcacacagttttgtcaccatggaacaccccaaatgccattcttcagcgtgtctggtaccttggatgttcaaacagggaacactgtcagggctgaggagaacagaagctctggtaagcgaatgagcccctagatgataaccaggaactccaggttctgctggccgtggcatcctctctccaggtctgctcccttaccggagctaggataaggtagcatgagtgacacctgagattagaggctggggctcactgcaggctgtggagaggtcatgctggtccacaggaacacttggcagtgctctcgtagacccctcggtgatgtggaatggacaggtgcctcgcaagagagcaagcacgttcataacaaaacagcaacacaaagacatgttaagcatgtttatttatttgcctgtttttgtttttttacttgagctgtggtcacagctgccaggtacctaagcaagtcagttgggtacagcaggacacgccaccattccagggtagctggtaccgccagaaacaggagtgggtcttgtcctgttgcaggcacactgcagtggttttcctgcagctctccaacaaacgcctgagtcacaggccagagctgccttggtatgttgttaagtccaaaacttcttctctgggctacctatcttccttcatgaagcaggtgctcaggacccggaagaatcatctacctcccagctttgtgagacagaaccaagtaaaaggaaacatgctagaaaacgtgcctagagaagacacttcaacctttgccttatccaacccctcttcagagaaaggtgtcccatggccccaaaaagaactgccaagttttggtgaggagtaacaccctggcatgacattccttctctttcctggccctcaaccacttccttcctttggctcttaagacctagcaggttctgtgaactctcaggccttggccagcactagttaggggaggtcaggtggtcaatgtcctggtgattttatgagactgccccactgagaaaacttacttacttcaggcatccagtgcccccacccagggttcaggccctgtctaaggtgttgcttaaagacaaaaaggcaacatgtgcctcactggtggtgtgccactgttctcatgctgcctcctaagtgactccgattttcagccctggtagaataaggaagacagctgatgcctccttagccccttagcacatgttcctaaggtgtgttgtcaagccaacctgaattctgcctccctgttatagtccctgtctcccccacagagacctgtgggtgctcccagcagagttgagactggctccgttgagttaatgactagaatatagtgctttcactacttgattgttaacctgttttcttctgatgccatcagtaccagcagtcagactattccactggttaagtgtttactaccattaaagcgaggcatgaagcaaagagctgagtgagtcctctgctctccagaggaccaagaaatacctgtgtgacacagacccacttcagtgtgtacagcaaattctatagtgcttctgagcccagcagggctttacctgcccctggagagttttagccgtcttgtgtttcttgtttacttcacaaccaaatttgtcccctcttctctctgttaagggagagaagtcactttagctggataatacctatgtaacaaactgagcagctgttatttgggcaaaatcaaaggaagaaagagactatggtcttctatttattgtgggaaggaaaacagggtggggcgggtgagtgaaaaggtggaaatccctggtaccttgcctggtggttacacagtttaaccataggccaattttaggggcctctgaagtatctttctacaaacgcagacaagctccactacccctaacctgccaggatgctcaagtccactgtcacaatccctttcagaaaacattagtggccgctgccccagctacagagacggccgaaatgctttcactccttagctttgccaactccatcctccaaaacttcccagaatacctccctttccagttctaccaaatctgtacttgggagcagcctgctggatccagaacatgacaacagagagctgcgtccacagggaacaaagccctgacctctctctccacattacccttacaaaaacaggccctccccatgagagagctacacggcaggggcagacactgtgagtataagctactttcctccctggagtgctctatgtgggcagaacatgctctccttgcctctcctggaaggtgtcttctctatggcctggctagagctgcaaaaaagggacacaccccacttcggtaaaagaaaatagggaaaggccataaacaaagacagacttgtagtttattttgtattttttttaaataaatacactttacattaaagaaaaaggcctttgatttgtaatttccacaatggggagaaagggaagaaaaaaagatttttgaaaaactgaatcacaaagaaaaatagagggagtgaacttatatcctaagttccctcaactccacaaaaccaatatccacaatgaccatgctgcccccaaaccatgaaggtgagtgaatttaggcatttacccagcagacagagtgccttcctccccacctctggcacgaaggaaaacaaattaacctgacagcatatgaggcaacaaaacaggttaaaaaatcatatattatatttataataaaatattcttaatccttatcaatttaagaaaccacgattttccttttcatttaaatacgtatgtaaaaatgcctctatattgttctttagacatcattttcttccaaagaaaatgaagtgcagggacaagagacctggtggatataagttcataccctcagttataaatgcctgtttttttttcctttttaaagttttataaaaaactatttcttgttctttaagtaaagaacactatacaaagaaaatatattgtgaaataccccagagacatggtttttttttccccttgaaagatatgtccatcctaggaaatggtggggggtggatgtggggggtgcagagtagggcctagtccctgttgtcatttttgtggtggttattgattctggaaggaccctcgggtgccaatgaggctctctaagccataatcttctgaatgcagggcatgcagctccttaaaagacagacagccctgggagaaagagaagggaatatgttctgaattcatttgactcagtttctcgcctgccaagaatctcttccaagcagtgatggctcctcactcattcagagataagatgatgtcatcttccaaatcagagttgtcagagctgtcagctgaaagggaagaaaagggagagacaagattacacactaggcttataggaagctttcctacagaagcacctgcactcacatacattcatgcccgagcaaggttaactaccagtttccagaaagaagaaaacacatcaattaactccttggagctggctctggagaatactcctgttgcttggcagttgtattctcccggagaccttttgctctcctaagggcctggacacagttcccctgcttcctgcctgggaggcgctgaagggatcaagcgagtgccatctgaagcttccccccatgccactttaaatggctgcaaaggggcagagctgacgggagcagtgagtaagcctccatggcccttggcctctgctgtccttcaaggatacgcacaggcctgcctgaccccaagagaccactagaaaggcaggctaagaccaggcaaaagtgagagatgtatcttttctgaaacaccttagtcactcccttcaatcctcagaagaccgaccaccaaggcagagatagtcaccctagattcatgcctctgtaatttcagaatatagtctgcaaattatattcccaaaaaggtgcaggccaatttgcagcaatacaagagaagtagctacccatccagaggcaggaggccagcgggagcagtgtgacgccctggaagacagcactgtctctgatgaggaccctctctgcttgacaatctgccttctctggcagcacacggacacattaacacttctggaaggatctgttaaggggtgaaacttaagtggtagcaaaaaggaccctcaagatgaggtagatacaccatgtctggctgatcaaaatcagaaagaaacagggtacctagcttgtagggactctaatattcgctgagtcaaagaaaaggaaagttctcagtgcccaatttgattactcgtagctcaggaggctatgaaaccattttacctaggtcccccataaaacagacaaaccctgagcccgtaaaacagacaaaccctgagctggagccctgcaaatgccccatgtggtaaggggcagccactagatgcaaagaatccctcatcagcctttttccagtgcctaagagaatcaactcttggacaaacagagagcaatcatgttcccaaaccttccttcattcattatccccaaacacaacttcctttaggaggaaaactgaagtggacaaaggaaaaccaagaaaagcatggcaatgatacaaaaaagtctggaagtaagcaaaagaaatggctgacaaaaccagtgttcctgggtctaagtgggcacaagagtggcctgactgtattggtgatgtattggtgaagagtaggaaaacaagatggagatggcaaagaactattatctaacacagctgaacaaagcaagcctcagctcctctgctgtaagagctccaggaggaagtgtcacaggagggtgtggggcctcctccccagagccaagtccagcactgtgtccccaccccataccacaaacttgcctggtccctgcggcagcatccacagcatcccccaggactcatgctctccacaagccaacaatgccagacccaccggcctgagacccttctgcccagcagctatgcagctcttaagaactaagaatcttaaccacgctgtagcacatctaagaactgtaaatgcagcttaacgaggtcacagcacaatcttctttaagcaagtaactgtcaggctcaaggtctgagagaaaacctccagggcttgggcaccaactcccctctggtggtcagaccataggacgcctttctctaccttccttatcctttccccaccttccttatcctttccccattctccaagtgttgaagtgacccaatcccaaaccctggttaggacctcccattctgaaaggtcgctaaggcagacaatctaggtataattaatccctgtagtgtttaacctatcgctctacaacatacaggttctggaggcagggctgacaagcagagacacataaagatctcagaatcaggccgggtgcagtggctgatgcctgtatcccagcactttgggaggccaaagcaggcggatcacgacgtcaggagatcaagaccatcctggctaacacggtgaaaccctgtctctactaaaaatacaaaaaattagctgggggtggtggcgggcgcctgtagtcccagctactcaggaggctgaggcaagagaatggcatgaacccgggaggcggagcttgcagtgagccaagactgcgccactgcactccagcctgggcaacagagtgagactccatctcaaaaaaaaaaaaaaaaaaaaaagatctcagaatcaagctgtttctcttcctagggccagggctctgcatctgcaatcagggagtccctgcagactccagggcctacgtaaaggtacgtgggggcgcatgggtgtggttttctatagtttctatggctttcaccctatcctaaaagggctcttcataagcccagtaaggttcagagctactgctctaaaggattagtgttaggcaaaaccatgggtgctaagaatgctctccttgctgacagcagctggctcttctatgaaacacagaaagagccatggagtgtgctccagatgccacctctgcatctccacctcaattttgaagtccactctgagacgtcctcaagttgtgatccattattttcacatcgtaaatattctcataaagtaacaacattctcacaactgatagagttaaagttttccagattacctttggcttgaaagaaggaatttcctcaacagctaaaagaggcagtaattgtacaggccaaatacaaactgagtggctttatattcaaattaagaatggaaaaattaaagtgatgctctcttattttgggagcaccaccatcagctggcctgctgtttgctgaccctgcgaacctgccctgctaactacttgtaattgaaaggaggtataacttgtttcccatgtctcactattcacacgtgacaaaaacgttcattaaaactttgtctgaccaggcttcggcctactccactgaatcacctcagcctccaagtatgaaaaaacagaagttgatgaacagcagatgaacatatagaagacactcccctaccctcccaccctcaagcttcctcaaaatacagccttggtaagaagattcatgtacagctgcagagctaacagcctctttgaactatttgctgatttctgcaggattcattaccatagtcaggggacaacttgacttcagaaacctaatgggaaataactagaagaactggagtttgttcctcaaaatttggattaagaaaaaaaggtaaataaaaggaagtgaataaaccagaagccaaagggaaaatattttccccttggctgttaggagggattagccaaagggagacaggaaagggctcctccacaagagggcctgcatttctttataattcaccccaaaaagaacagcaccccatgaggggctgcttctgactgattctagccatgcctctcggcggagagctacactttggcctttcattctaaggctaatcctctgaagcaggagttgacaaactacaagcccaccacctatttttgcaaaacaaagttttattagaacacagccacaatcattcatttacggattgtctatgactgctttctcactacaacagcagagttgaagagctgcaacaaaggccatataccctacaaagcattttttttttttttttttttttttttttgagatggagtctcactctattatcccagcctggagtgcagtggcacgatctcggctcactgcaacctccgcctcccaggttcaagcgattctcctgcctcagcctcccaagtagctgggattataggcatgtgccaccacgcccagctaattttgtatttttagtagagacaggatttcatcatgttgcccaggctggtctcgaactcctgacctcaggtgatccacccgcctcagcctccaaagtgctgggattacaggcgtgagccaccgtgcccggctgcataaaatatttactgtctgatcttacagaaaaagtctgccaatctctacttgaaagataagaaatgacagccatttggttgggttccacagtctgacaggagaggagggcagagatgcaaaggtgctttgcctcaagagaccagagtagtgaatcaaattatggggcacagaaccgtggtatggcttgccctctaagttgtatgggcacaaaagaagggatcttgccctgggtgccaaggctcagcctgaactctgccctatacttactgtcccccaggatcagttccacctcctcatctgcatcagagtcttcatcctccccgtcctctccctcctctagaaggtttgctagctcctcatcagagggagagaagtcattgtccccatcttcccctgcgttctcattattgtcgtcctcctccaactccgcctccagcaactggtcagtgtcaagctcatctaaatcatcggtgtcatcatcatcttcatcatcatcttcttcctcctgttcttcctcttcctggtaagaaagcgtaatgttcattagtacaaacacagaggcctgacccatgggggccacatggcgggtcgaccaaagagacagggtaggaaactgtcagtagagggtagtagtgatctagacgagcacagacttcatgagccagccagacttgtcagtgatggctgagataggcacacatgtccctcaagacggtcaaagcacccctcagacaaggattaatggtcacatagcccttatgcaaggaaacagacaactcgcttcacagaagtctctgccttcaatattctaggagcccaaggggactcttctttctcacctgcatcaaccaaagcaagtgaaatcagctgagacactagaaaaaatccttttacctggaatctaaaatgcaatgctttaacaaaatggaagaacacaactgctcattatctcctcagcccttcaagctcttgcccttgatcttctaaccaagaatgtggataagctcctaactatgctatcacaaacatttgatcagaacaacattgcaacaaaagacttaaaatatagaacactaacagaaacccatatttcctgtcataagccaaaaagaaaaaaaagtatgctggagaaactatctttctttccattcttacaagaacttgcaaaggcaagaaaattaccagaacatcaatgaaatactttgttctagggactctgggctttgtaaatggtacattctggcatctgccacagatttcaggtttgcattagaatcccaactgtttcccttcaaaagggagaggacacaaagatacctctttgctttgacagggataagaggcatttccaagtaaacgtagctgccactcaagacacttatctttctgctcaaacatcaactgtcagccttgccaatagcaaaggattctaattgttacaataataaaatgtaaaattcatttaatacatcaacctaatgaaattcaagatggaataagcccaacgtaagcacaaaaaaattttttttgttcttattattttaaaacttatactcagtggttacatcttttttcattttgaaggtgttattgcctgccaagcacttaaaaaacaagcattttgtgcttacccagccactagaaaccagtgtgtaacataagctaggatcattcagcagggtagctccgctttgtggacttctggtaattttggaaccaccattagtgactttttgataaactgtgtaattcagtaatttagactcttcaaaatttctgccagttatgttggaaaaactgagccccttttaaatacctagtactcctaatacttgtgcaagtgcgtgtatggtctgtaccagattcggtgggagcatttgtgtatgtgccaacacacacacacatagaaggcctgagactattccaaagccttggccacacatcccctccagaggtgagtggataaataactactaagcattcacccgcctcaaaggaactatgagtgtctggagtcaacaatgataaactgaaacacagacaggctctcagcccctacaagcacataagctcatacaaataactgggaaaggagagcggggtcaaaattcaggggatatcatccaagtgcttaccagattacaacttttgcctctttttccaggcgtattttcatagacttgaccaaaattagctaatccactaacaaagtgccacagttaaaaataagtaaggaagaaagtacccagggccctgtgtcttaaggcttcgtggacagaacacttatatttaaaatttaagatagcacaactaaaggtccacggttgagtgtgtacatgaaaggttaaactgctcaaataggcatgggctagccagaaaattcatgaagacaattctctttcattttgaagaacattgaggcttagctgttctagaagaactgaacaaaaagcttccatatcaagagcaatcctggaatattttcaagcagggtctaagctttgaactagataccattccaaactcttccagcagcagacaaacccaaattttacttaattttatagcagaagaaacagatgtatatatattcatcccagaaggccacaaacacatatgtgaccatgagagagaggaggggaaattagtaggaaagagatctacctgaatctcaagttgagcacctcactttgtcgtctctactttgtatttaatgcccaatgctgatttctcaccatgcattttgtcacacatggacatagccataaactcactttccaaattttaaatctgaaactgggatcatgaagcagaggctcacaagactcatccaaaatgctgtggcagaacccaaaagagattctaggaagcaattttaggtgcattctctgctggtcaagtaactggtggcatgaacccctctccttcagatctaaagaataaagcttccaataatgagtggtccaaaaagtaaaaactaaaaataattatttaatgaaaaagcaaagcttagctgggcacaacggcacacacctgtagtcccagctactcaggaagctgaggcaggaggatcacttgaacccaggaattcaaggctacattgaactacgattgtgccactgcactccagcctgggcaacagagtgagatcccatttctttgaaaacaaaaacaaaaacaaaaacaggccgggcgtggtggctcacacctgtaatcccaacactttgggaggctgaggcgggcagatcacgaggtaaggagatcaagaccatcccggctaacacagtgaaaccccgtctctattaaaaatacaaaaaatttgctgggtgtggtgatgggcacctgtagtcccagctactctggaggctgaggcaggagaatggcatgaacccaggaggcggagcttgcagtgagccgagatcgcgccactgcactccaacctggacaacagagcaagactctgtctcaaaaaaaaaaaaaaaaaaaaaaaccaaatttttctagaatcctgactcaactctgacaacatttagaaaatgttttggatccagggatattgtttttttttttaattctctaagacttc

SEQ ID NO: 3 - DNA, 567564 bp, human
  misc_feature (7734)..(7940): n = any nucleotide
  misc_feature (29852)..(30196): n = any nucleotide
  misc_feature (31968)..(32099): n = any nucleotide
  misc_feature (34403)..(34609): n = any nucleotide
  misc_feature (37276)..(37480): n = any nucleotide
  misc_feature (40661)..(40829): n = any nucleotide
  misc_feature (45676)..(45856): n = any nucleotide
  misc_feature (48261)..(48451): n = any nucleotide
  misc_feature (56355)..(56561): n = any nucleotide
  misc_feature (63500)..(63706): n = any nucleotide
  misc_feature (73472)..(73678): n = any nucleotide
  misc_feature (87613)..(87820): n = any nucleotide
  misc_feature (90566)..(90773): n = any nucleotide
  misc_feature (92003)..(92209): n = any nucleotide
  misc_feature (93576)..(93783): n = any nucleotide
  misc_feature (100153)..(100383): n = any nucleotide
  misc_feature (141149)..(141355): n = any nucleotide
  misc_feature (191400)..(191607): n = any nucleotide
  misc_feature (217134)..(217341): n = any nucleotide
  misc_feature (273806)..(274012): n = any nucleotide
  misc_feature (343087)..(343293): n = any nucleotide
  misc_feature (358518)..(358724): n = any nucleotide
  misc_feature (368966)..(369172): n = any nucleotide
  misc_feature (444519)..(444757): n = any nucleotide
  misc_feature (451832)..(452062): n = any nucleotide
  misc_feature (564916)..(565143): n = any nucleotide
gaattcttcatagttcctaatttctaactatcttccaagcattttctgctaaaaatttattatctcttctacctcgcaatgagcttcctcctttctttctttttctccggatccacaccatattctgaaatccattcccaaagaggatatgctgtgagctgtagtatcattagataggagtccaatctccgtagtcttagagatcgactggcttgtactttctcatagacctgggggggtctcacaaggctttgcacctattgggtgcttcctagatgtttattgactgattgatagacctgtgattctaaatgttttagatacagtcatgtactgcaaaacaatatttctgtcaacgatggaccatatatgtaacggttctcataagattataatggagctgaaaaattctattgcctagtgatgttgtggccatcctagggccacagtgcaatgcattactcacatgtttgcggtgatgctggtgtaaacaaacctactgcactactagtcctataaaagtatagtctatacaattatgtccagtacataatgcctgacaatgataatcaacaactatattactggtttctgtatttactattctatacttgtaatcattgttttagagtgtagttttacttataaaagaaaagttaactgtaaaacagcctcaggctggtccttcatgaggaattccagaaggcattattatcgcaggagatgacagctccatgtgtgttattgcccgtgaagaccttccagtgggacaagatgtggaggtggaaggcagtgatatggaagatcctgaccctctgtaggcctaggatcatgggtatgtttgtcttagtttttaacaaaaaagtttaaaaagtaaaaaaaataaataaatttgaagtagaaaaaacctatagaatcaggatataaagaaagaaaacatctttgtacagctgtacaatgtgtttgtgttttaagctaagtgttattacaaaagagtaaaaaagttaaaaaaatggaaaagtttataaaacaaaaaatttacagtaagctaaggttaacttgttattgaagaaggaaaagtgttttttataaatttcatgtagcccaagtgtacagtgtttctaaagtctacagtagtgtacagccgtgtcctaggtcttcacattcactcaccactccttcactgatccactcagagcaactttcagtcctgtaagctccactctgccctacacaggtgtgcaccatttttaatcttttacactgtatttctactgtgtcttttctatgtttagatatggttagatacacaaacaccattgtgttacagttgcctacagtattcggcacagtaacatgctgtgcagatttgtagctcaggagcaataggctatatggtatagcctaggtgtgcagtaggctctaccatctaggcttgtataagtacactctatgatgtttgcccagtgatgaaatagcttaatgctgcatttctcagaatatatccccatcattaagcaacacatgactgtaatcgagaggagtccaggaaattgacaaaaattggtgaccctccgtcaacctccctggcttgcagaagcacaggttaatgtatattgcagctgccccaatcttctaataatttactgtgaagattaagaccctaatcttcaagagaccaaggggtgaagatgggtatttgtgttcaagcgctagtgaatttgaggccgactttcagacaatgcccataatgctggtcaccacacagggggccatggagaccaaaggtattcacaacccgaggaccgtggctggaaaatgctacaaagtgtgctgtggggttgcacgtgtgaagccactggtgccactcccatgccacatgctctttgctgttgccttttcccactgtctttttctccattgttttccttcctgcctcagtcagagaagtgaatcagggatgtcaggtgcaatgagccagatttcttccctgcccacatgatatgagatttagtaatacacactgttgcttaatactgacatcctagaacttatatatacctataaatggacctctcttccattattccagttagtcacactggcatatgattataattccctgagcaaaggaagggctccatatatgtagcaaagcatcgcttttgaggtgtgtcaaaagaaacttgttattagtcatgcttcaagcatccaagtttgtgaataatatattttaaaacataaattagagcagattcagatttctgtataataatttcattctctttgacttgcatttgacatgattttatgaatgaaagggagagaaatggtttattataagtagtgggtggtaatctgtgtacataacagatgttgaatgacacttttgctatcttgaaatattcagttaaagccccaaagccaataatgattggataagaagctcctagggaattgctgcttgataggtccctgtaacatctaagaggtgaccaaaccagcactgtgatctttagctcaacaaatacctccaacttgtgcaaagagaagataaagattcaaggggcatgatcaaggaaatgaatcatacactctgggggagaagggtttggttcttcctcctgagcctagtgtgggagcttcccgaggccaccaaactgggttgtaagagcaccagtcaggaagcttgtgtgcccactttgcaccattatccttttccctgctctaacctggaggagggacggctgaaggtggagatgctgtaaaggggcagtggaagtgcagaccactctccatctccatgtgggtcagggcaaggctgggtgggatgggttgggtgttgagggtgagaaggctgagtattgaatcccatgggatggatccatgggatggatattttgattcagactggactgggcctgaaagtgagtcttgatgatcagaatgagcttgtttgttgaactgacggtgactggaatgttttgggatttgtgaagttgtgtccatgggcagagaagggaaatgtgacagagcaggtctgaaggcagtggctgggagaaaataatgaaccctgactgactcagaccacccaataagctggttgtcctcatgaccctgggtgcaccgtggagtacattctgtcggggtccctcatctgtgctgggtgtcttagaggaaaatgggctgagaacctttgggctataccttcttcacatcccctcaatgagcctcaagaaatgccatcttggtgttcaaggagtggtctgaggagtggatggaagcccctgtccctagaaatgtcccttattctctcatttgacacctctctcactgcattagcagagacgttttgcttttaggaagttttcatttgaaatataaatatttccatgtgtattgaaatagtcacagaggctgtatcagtcagtgactttgtggggttgtttgatgggatctagtctctacccctgctcagaaacattgctggctccccggtatctatgtaatccactctgcaccatgtagcctggcaggcagggccttctgggaactggccccactgtcttctcactggtctcctcctaatttctccatgctgccccagacgtcaatgtatccagctcttctggagtccatgtgctctctggaacatgcagctcactctccccatctattaccatcatgcctttctccccagtgccaccttagaagagtctactcactgggctgggttctgaggccatctcctaccatcttctgaggctatcttccttgagcctcccaactgatttttttcctcccttaatatccttaatgcagaaaccagcccctgtcttgataagatgacattacatatcaggagttggaaaaagagaggtggaatttagcactacgacagctcaggaaggttttactggacaaactctgggacttctttcaaatatatgttatcaacaaccccttcacctattttttatttttaggtctaacgttcacctttccctctcatattgaatctcatgagatcttccctgagagttgtgagggcctccctgctgctgacccacgaggtcctccctcacaagtctcgtgtgttcaggaactggctgatgaacgcttgcctccttcttcctgccccgcagaccttcataaaccacaaggctttttaaaaaaattctgatgcctgtaggtttaagctttacaccatcctatagctttgtctgtgtacaattctagcatactgccagccttagaattttcggtcaggtccccctaatagattgtatacttcttggcagttccttcccttgttcattgggttcacagattctactccatgcagagtactttgtgctttgtaggtgcttaataaacgtggtgagtgacaacccatgatatctgaacttactgagaaaacattccagagggaggtaaatgaggatgaaaggaggctgttggcagaggtgaggaactaggggctctgcagaccagcttccatgatgccgccatgtggcctgagattggcctggaatcagctgcactatccctcttcacataaggctacagactttggggaaagagaatccttctccctgctttacctctatacaagttcaggcagctgtgtatgtgtgtgtgtatgtgtgtgtgtgtgtaatattggaacaggcagcacagatgagggcttggcagtgagagaaactgtagctttgacctcttactacaaagtgtgatgaagaaggcttgaattttcaaagaattcaactgtgtctaataccaggtctgtggtataacgttcttccttggctgggtgccaaaatgtaacataaatgctacacccagagcaaaggggtaaaagagacccactagtgtttccagggttaaattctccctccttcacagagccttccagattcacacagtccactcaagtctctcctttgtagaagatcctacagcatttaatactggatgctgctcagtttagccctcaatgatagtgtcttgctatttttggttagtttctttaaaaatataacttctgtcttccatttacttaaatctcttccacggcttctttgcttcttgttacatgaagcagtgctgaacacagaggaggaactcagtaactgttaattgttttgctctctaattaggcccacgatagagtagatactattgggtgctggtttttaggggtgtaggaaaggaatctggggagtcatcttcaaagatcagatgcacaaatcttaacaagctgcctctctctagtggcctcagggacttgaagcaagatcaactgacttaaagaaataaaccacaagtagttaagaaacacaaaagttcaaattgcatccggtgtagctctgtgagaaaatttctgcagcagaaggaagtctgttattcttgacctgaactttagtattctgcagtaatgtggggctgcaaaaatgctcctaatctctgacaaagttaggttcttatccatatatcataagtgaaatgagaggaattgactgataacagagaaaaaatttcccacttggcacatacagacagtgtatgtatatgtgtatatatacatagatacttaaatcaaagtaattggttaatgtaatggaaatttaatctcagttttaagtggtgtttcttctttatttgatgtgcattattttaaaaacacagcagagacatagcctttaaccacctcccccatgcctctgacattattcatactgaagttttcaagtagcagacttggaaagtgctttttaactacagctcatatcattagtgtttctgctgtataagcagaaaaaattgggatgcagcttagcaaaaggcttcaggacaacataaaatacaaagggtaatagatctgtttctcaaacagttttcctgtgtaatgcgcatcctaatgatttctttttaattaaaatattttcacaagtctcagaatgagtaacctaagactattttgttgggataatctgtatttcctgagatgtgttaacttcagggtcactggtctttattcagttcttgctctgccaggccacaggctgcctcattctctcctttgccctcacagcttggtatcagctcctaattttgcatctgggctctaaactggactttccagctccctgatggacatttcagaaatgttctattgatgtttctaacgcaacaagcctcatgatattatccttgtgttaacatcattgtgacatcctccacacacccaagtcaacttggacttatttttctgtctcctacaagcaatggctgctaagtcctgttgattctggctttgaaatgtctagagaataccctctcatgtagtcacttctatttttgttgccctagttcaggccgtactctctcttgcttgcctggaccatgacaagtagctgtctagttggtctcatgggctgctatcgatttcctctcaagagtacccttgaagttgccccagagtgctcttcctaaagaatgacttggtgatgtccctttcctactgaaaaaacttgtggtaagtcccaactgcctactgaatctgtttccaactttactcttcagcctcattttctgcaactccctgtcatctccccatgctgaaccccaagagacaactcacgattgctcgatgagatgtccaatttcattcctttgtgctgttgcttgggttgtttaatgcctagaaactttagcaagacaacatgcaaatattctgcagcttctctgtgccccctcacacctgcctgctccaagcgtcattcttcctttgcagttaaaaaaaaatccgttttggcaggctttatgcagaatttgtttacatttctatctctcttacacatgaaacttgaactgctagacaacagagataatgcaatttatatctttgtttctttaaagactcaagttggtgatagatgcttattaagtgcccagtgaattcttgttgaataaatgaattgttgccttctttgtgaatctttatccagttctctgaagcaaacattattttgtatttatctttaagttttttctctttgtatttggtttccagcagatttccatgatgtgtgttggcacgtttttctttctgtttatcttcatggggattgaagggcttcttgaatctgtggcttgacgtttttttgtcagctttgaaaaattcttggtcattatcacatattgctttgcctccttgtctttccctcctcttttggactctaattccatatatgttaaatttttctactaggtgccataggtctcctatatttttttctatcttttttctctgtgcttcattctgagtaatttccattgttttatcttccaaattgctagtcccttttccagctgtgtctaatcttctgttaagtctatttattgagttcttagtttgtaatatcagtttagatttttcatttgatttcttttttgtagattctaattttctggttactttttttcaatcttatctatttttatcagcttatcaatcataggattttaaggtatttatataactccttggatttctagagagactatttctataatcttttaaaaaatttcttgggcatatctcttgatatgtttgttaacattttatcgaatgccaaatatatatataaaatagcacagattatgaatgatactctctttttccagggaaaacttaaaaactattccagcactgtaacactgctgatagtnnnnnnnnnnnnnnnnnnnnnnnnnnnnnnnnnnnnnnnnnnnnnnnnnnnnnnnnnnnnnnnnnnnnnnnnnnnnnnnnnnnnnnnnnnnnnnnnnnnnnnnnnnnnnnnnnnnnnnnnnnnnnnnnnnnnnnnnnnnnnnnnnnnnnnnnnnnnnnnnnnnnnnnnnnnnnnnnnnnnnnnnnnnnnnnnnnnnnnnnnnnnnnncactatatgcctctctataggtgcttcttatcaatcagtaaatgcctcaaggggaaaaatgtttgcccacatggttgggctcatttctttctgcttcctttctctcctggatcttgaccctttaagttctgattgtcttgctggccctggactcctagccctgttaggtggtgaaagttctgttctgcttttttttttttttttttttttgcttcttagcagctgctttctacttggcttctcagtccttccacacatgctgcatatgaatcagaaaatgctctgaagagaaaagtagtgatttgggctcacctcagtgagtttctcttcactctggactcctggccctgaaaatcctggcttccttgagtttccaatgtcttcaaaacaggttgtttttgtttttgtttgtttgttttccattttatcacacctttgtggtttgttcactgggatgtttgcactgccataaagtagtttgccatggctagatgtgggagtctgtgtgttcttctattatgatgctttcttctactataaatttctttcatttgtgagttctgtgagaacaaggacagtaatttatttcatttatctcttgtaaaatgccaactcattcattaattcactcaacataggttttgagcacctactatgttgccaagtagttgccaagtgctgaggacagagcagtgaagaagatggacaaagtctcagctgtcatagggcgcatgtcccagcatgggacagggcacacaaacaaacaaatagcaagaatatcaaatagtaaaagggggngcgccccggacgaaattcacatgctgagggagaaggtgggtggctacttaaagccttctctttttgtggaaccattactttgaggtctgaatgacgagaaaatgttcttcctgaggagatctagggaatttccaggcccagagaggagccaaggtgagggaccaggagttgctaaagtgattaaatttgtggattctaaattaaaaattttaacataagcttctttttttaacctctgagactatatatgtataggcaaatatcctatttttgtttaaaaatgagaagaattaggatttacataaaattgttgtatttttatcagagctctgttatcagttaaggtcttagcaaaaaccaatccaattcacatagttcaagagactgcaaagaagaggctccttaaggggtgtggacaggattaagagaacgagcagggttgctgaggcacccagagactagcaacagtggcagtcattaccaccccaggcctgaagggatgaagaacattgcaaagtgctttactccagtctggtgggagctgaagtcagggagagatgtagtcgctaccagaaaacatgctgcagggcagggtgggagcaggaaggcaacatcttctcttctttttcctcctgcctcaccttgaggggtcggtcttggccaaacccaaccaagagccagctggcagtggagccaggttgatgtggtccagtggaggcagtctccaaggctgcacagagaggggcaagaatgggcctggggagaggcacaaaccaaccacaccctcaggtgcatttttgagatgacaagcaagaatgaatttggaaagtttataggcttcttttgtagcttcagccttactaggacttacatgatataaagtgcctttcctacgtcgagaatagggggtctgaagggttttcagtcatacattatgtctttaaggacagaaattttttttgaggaaacttgcaattagcttgggagactatgaggacataagaatatgtggagttttgaaggaaagttttagggcagagtctggcatttgtgctagtaagaggaagagacccagcgagagactggggacaaagctttaagtcagagagaggtcagagaagaaggtgcctgcagtggaacatgaaatcctcagtgtaaattcaccaatacccaaaaagagtcctttaaatctggccatacactgaaaatctgtctgctaacaaagggttcatgatatccaagcaaatatggtatatgacccagaaatagctattttttcaattcagcaatttaaaatagcaaaatcttgaaattttattgcccaggatatacaaaagtactcatacacacttgtctgcatacccaccaacacaaaatgtcaatgtggacacacactcccgcttgggcctcctctctctctccggctccattttctccgccgccgggggccggggtctcctgtggggggcccagccggtatcccaggtctcccttcagtgccggggtgaacccccgggggagccgagagccgggggcagacgggcgggggttggggcggagggagcagcggccccagcgagtttgtggggagaagtaaccaagcggggggaggggctgagcagggagggggcctcagggcccccccccagctatggactaacggctactggggccgcctcctccaggcggggcccggggggggcctgggattggtgagtggggagcctgggggccctggcgagcctcctggtggcggagaccccggtgggggtagcggggggttcccgggaggccgagggaagcaagacatcggggacattctgcagcagataatgaccatcaccgaccagagcctggacgaggcccaggccaagaaacacgccctaaactgccaccgaatgaagcctgctctctttagcgtcctgtgtgaaatcaaggagaaaaccggcctcagcattcggagctcccaggaggaggagccggtggacccacagctgatgcgcttggacaacatgcttctggcagagggtgtggctgggcccgagaaagggggcggctcagcagcagcagctgcagccgctgcagcctctggtggtggcgtgtcccctgacaactccatcgaacactcggactatcgcagcaaacttgcccagatccgtcacatataccactcggaactggagaagtatgagcaggcatgtaatgagttcacgacctatgtcatgaatgtgatgagggagcagaggcgccacagcgcctgtggcccccaaagagatgaaacgcatggtgagtatcatctatagagagttgagcgccatccagatgcagctgaagcagagcacgtgagaggatatgatgatggtgcgctcctgttttgtggatgacagaagaaagcgctgtaatttcaacagacaggccagtgaggtcctaaatgagtatttctactcccacgtgagtaacccatatcatagtgaggaggccaaggaggagcttgccaaaaagtgtggcatcactgtgtctcaggtctccaaccggtttggcaacaagaagattcgatataagaaaaacatcggagagttccaagaggaggcaaacatatatgctgtcaagacagctgtgtcagtcacccaggggggccacagcagcaccagcttccccgacacccccttcctgtgcaggctgtggcggctctttcaatatctcaggatctggagacatgtttctggggatgcctgggctcaacggagattcctattctgcttcccaggtggcatcactccgacgctcgatggggccagggggctatggggataacctcgggggaggccagatgtacagcccacgggaaatgagggcaaatggcagctggcaagaggctgtgaccccctcttcagtgacatccccaacggagggaccagggagtgttcactctgatacctccaactgatcttgcccctcagggtcacaggggtgggggctctcacaaggcgactcttgaagaggacgcaggcttccagaggacaaaccccaatacaggagaagcacaagacagagaagggccaatggggtcatccgctccctaatgagactgtctgtgctgggggtgctaattacatggcaggaagaatggggccctaaggggagtgtggggtctgtctctccttttttcaactttttctctctcgctttctttcttacacagaacatgcacataccagaaacctattttctcagacccctttttctcctctgtcttctctctccctctcccacacctcacacacacatactcccacttgcaactattctgttctctcctgggctcccccactttcccttccccaccccacttgtaggctctggaatctggagacgccagccctgcccaatcagagatgccaaaaatggggacatgacttctggacagaggacatgggacccgcccccatgcatccccacccctgcccctccagacagcttacttacctcatacgcagctcatcttaaaccaatagaatcgcttggtggacgagagtgtctgactcagatatctacctcggagggagtttctgctactttagggaattattgactgggctttggggttgaacttttttttttttttttttttaaagaaagaaaaagaaaccctgggatccatctgtttttgttgttgttgttgtttttgttgttgttgttgttggtggtggtggttcttaatttttaatttagtttggggaagtagcttgttttttttttttaaataaatatgttgatttcttgtcttttttttatttcttactttcccatattaggggtgatagccaaaggggttctggtaagagaaagggggacaaacagaactggtaaagaggcccccctggctccaggcctgtccatcaggaagtaaattttacagggcaccaagctttgccccctaaaatccattaggtgttctttgttcatgcaggcaggtttctgccgcatttgatgtggaggcagtgaagggcttgccctgctggcctctcatcccccttcttcccacaacccttgggcagggctggactcagtaattttgaggaaattgaagatgccatcttcccctgtgagtgacatgtctttaattttttaaaaaactctatttgaaaattggagggggaagaatgggaagggagttattgccaaatatgttaattatgggttggggtgcttgtatatgtatcttcctcaatttccgcataaatgaggtatctttttgtcacaccaaaatcaaggggtagggagagggaggaggttgcaaaaagccagatgtgggggaaaagtaacatcaacactgtcccatcctcagccctgaaccctaccatctgatcccctcagacattctcaggattttacaagactgtcagagtggggaacccctcccattaaagatccgggcaggactggggacaggttggaaatgtgatgggttggggggtgggaggcatgggccgggggcagttctctcctcacttgtaaacttgtgtagtttcacagaaaaaaaaaatgcagttttaaataaagaaatttctttaaaaaaaaaaaatgtcaatgtgtccctaggcctggagaccatgtgtgattaggctaagttatatttagttcctatctaatattttcccataaaatattccaaactgaacaatctctcatttctacatttgaatattgtgtaacttgccagtgaatattttttttgttactttctaaatttccattgtttctttttcacatgaaaaataggacagttcttagatggggaaaggcaacaggataaatctgtggttcaaaggatataagcactattttattactgaaaacttgaaatgacttattatgtggcatattattcttctcaaaagcctcgttagtatttaccattttaagaactttatacatttttaactcattaagtctcacagagacaatgtgaagcaggtactaatgttattattgtcattataggcatggaaagctgagagctgtggcacagggaggtgaaataaccagcacaaagccgtacagttgacaagcgaggaagccagggttcaaatccaggaagtctggctccagagtctgtgggctaaaccactatgcctagtgttcaatggagacttgagtttatgataatctcgctgctgtagggttcagatttgcatattatgaaatgaaatgtttataaacgttccaaccaacgttttcttttttatttttttcttcttcaacttttattttaaactcaggggtacatgtgtaggatatacaggttgttacataggtaaatgtgtgccatcgtggtttgctgcgcagatcatcccatcacctaggtattaagcctagaatccattagctatctttcctgatgctctctctcccccaccccctcccctgacaggccccggtgtgtgttgttccccctccatgtgtccatgtgttctcatcattctgctcccacttataagtgagaacatgcagtgtttggtttggctttctgttcctgtgttagtttgctaaggataatggcctccaactccatcaatgtccctgcaaaggacatgatctccttcttttttatggctgcatagtattccatggtgtatatgtaccacattttctttatccaatctatcattgatgggcatttaggttgagtccatgtctttgctattgtgaatagtgctgcaatgaacatacacatgcatgtatctttataaaagaatgatttatattcctttgggtatatgcccagtaatgggattgctgggtcaaatggtatttctgcctctaggtctttgaggaattgtcacactgcctttgacagtggtggaactaatttacatttctaccaacagtgtgaaaacacttctttttctctgcaaccttgccagcatctgttgtttttttgactttttaataatagtcattctgactggtgtgagatggtatgtcattgtggttttgatttgcatttctctaatgatcagtgatgctgagctttttttaacatttgttggctgcatgtatgtctttttttttttttgagacgaagtctagctctgtcacccaggctggagtgcagtggcgtgatctcggctcactgcaaccactgcctcctgggttcaagcaattctctgcctcagcctcccaagtagctgggatcacaggcacccaccatcatgcctggctgatttttgtatttttagtagagacagggtttcaccatcttggccaggctggtcttgaactccttacctcaggtaatctgcctgcctcggcctcccaaagtgctgggattacaggcttgagccaccaggcccaacgtatgtcttcttttgagaagtgtctgttcatgtctttttcccattttttaatggggttgtttgtttcttataaatttatttaagttccatgtggactctggatattagacctttgtcagatggatatattgcaaaattttctctcattctgtaggttgcctgttcactctgatgatagtttcttttgctgtgtagaagctctttagtttaattagatccccatgtgtcaatttctgctttttgttgcaactgcttttggcaatgcatttgtcatgaaatctttgcctctctctatgtcctgaatggtattgcctagattttcttctagagtttttatgggttttgagttttacatttaagtctttaatccatcttgagttaatttttatatatggtgtaaggaagtagtccagtttcaattttctgcgtatgactagccaacactcccagcaccatttctcaaatagggagtatttccccattgcttgtttttgttaagtttgtagaagatcagatggttgtaggtgtgcagtcttatttctggattctctgttctgttccattggtctgtgtctgttcttgtaccagtgtcatgctgttcttgttattgtagccttgtagtgtagtttgaagtcaggtagcatgatgcccccaggtttcttctttttgcttaggattttcttggctatttgggctcttttttgattccatatgaatttgaaaatagtttttttctaattctgtgaagaatgtcaatggtagtttaatgggaatagcactgaatctgtaaattactttgggcagtatggccattttcacatattgattctacttatccatgaacatggaatgtttttccatctgtgtcctctctgatttctttgagcagtggtttgtaattctctttaaagaggtccttaacttcccttgttagctgtattcctaggtattttattctttttgtagcaattgtgaatgtgtttattcatgatttggctctgtgtttgcctattgttggtgtaaaatgctagcaatttttgcacattgattttaaatcctgagacattgctgaagttgcttatcagcttgagaaacttttgggctgagatgatgggattttctagatataggatcatgtcatctgcaaacaaagataatgtgacttcctcttttgcgatttgaatacactttatttatttctcttgcctgattgccctggccagaacttccaatactatactgaataggagtggtgagggagggcatccttgtcttgtgctggtttacaaggggaatgcttccagcttttgcccattcagtatgatattggctgtggatttgtcatacatagttcttattattttgaggtatgttcctttaatacctagtttattgagagtttttattatgaagggatgtcggattttatctcaggccttttctgcatctattgagataatcatgtggttttctctttagttctccaactaacattttcaaaagtgcccatgatacaagtcttcagtttaaaaatattgttcaatattgtgaagagtatcataagagaatctattactctttctttgggtcaataaaagggaaagatctaatctagcctttctcaaaatatgttccctgaaaaactgaccctgcaggatactccctctaaaaaaatgtttccatcatcaaataactttggagaatatcacatgctatgtccatatatttgagagtcataacacacatatttaaagcaccaaggctaggtgcagtggctaacacctgtaatcctagcagtttgggaggttgaggtgggaggattgcttgagcccaggagttcgagaccagtctaggtaacatggccaaacctcgtctctacaaaaaatgtacacacacacacatacacaaattaaccaggcctgctggtgtgtgcctgtagtcctagttactgagaagactaagatggcaggatcacttgagcctggggagcccaaggcttcagtgagccatgatcactggattgcaccactgcactccagcctgggtgacagagtaagatcttgtttcaaaaaaaaaaaaaaaaaaaagtacagaaaagtacttaagtgaagacacatgtttagctttttttcaacctagaagttaagttgataaactctaaaaataattccaaataattatttttcacaaagaacttgttaacatcctgtagaccagtgttgcacaattttgacctggttctttaaagtgaaaccataggctctgagatttctagaaggcgagtggaaagtgctgaaaacaaaaacaaaaacaaaaaacaactaacaaggcaaacaaggctatagactgtcatctttctgtctgtggtgtctaaattcaccttttaagctgtaccgtaatctactcaatgcatacttcacaccattgaattccgttgccttgttggatttccttctgatcttagggaacttgcaaagtgagtctagaaatacagtgttgagccttacttgccctcacggtgtgtgctgtggatgtctcctcatatagctctgctctgtttgacattttagagtgatttctgaatgctcaaaaagggcagattctaaatccagatctggtaagaaatgctgttacttatctgagaagaacagccatggggtgtacacacatacgtgaaaaggagatctttcaaaaacacagaaatacgtgagggaaggagtgagggagtgggagaaagagagagagagagagggagagagagaaacagataaagggagacagacagagacagagagggagagacagaatgagagagagatagagacagagagacagaaagacaggagaagagagagagaggagttcaaggttgatgtgggggtttattatttattgaaggctttgtagtcatcgtcatcactccatgtgctaatttatctatatctggcctggggttcccaaccacattctatgaatatggttaagtacattgcatttcttcttccccatcataccactctctctcagtaccagtcaggtttggttgactgtatttctggacaactggttctggctctggtattgggactctggctctgttctctcttcccaccccttccaagttggccctcctgcctcttcactcccagtcttttggtccctgctggacaagttaactgtcccaagagcaacaagaaagaacaactttggcttctcacagccagttattgctcatgtttctctctccctcagctgggctcctgaggcccaggtctaacagaaaccactgttgcatggaccctcagtgctgtgcttcaatttttccattagacttggcctgctctgttggggaggaaattgctctctggaagtaaacttgtgacctgtgcaaaatgaattcactcttccacgacaccagaggaccatttagtaaattactttcattgcacagaatactaccctggtgtcctggaagatggaattggtgtcacacgggtgagctattttctccctgagaaaaagtgttcttatacaaagggctctggcgtgtcggcagagcccaagtcctgtgggtgagtagactgagggagctgtggctgagggtctgctgggacagagcaagcctgcctgagatatgctgcttgtaatggggttgtgttttgtccctgaaggttctagaaagggatcaggagagttctgtgggtactctaaaactgaattcctgaccacagtttgctacaattgctatcattcacgtcaattaacaacaacaacaactgtttatttagctcctatcgtgttctggcacaatggaagatagttcacacatatcatgtcacttaatttagcaacaacagaatgagacagatttttttttttaatgtcaccattttatcaatgaagaaatgtgactttagagagttcaagttccacgtttaaggtaatacacacagaccacttctatggattgaatctttgtgtacccccaaagtgatgatattaggaggtagagcctttgggagataagtaggtcatgaaggccttgatgattgggattggtgtcttcacaagaagagatgtagagcttgcttgctctctccctgctctccaccatgtgaaggcacaaaaagaagatggccatcttcaaacagggaagagggccctcaccagatgccagatctactgggccttgatcttggacttttggtctctggaactgtgggaaataaataccgagcataaggcattgtgttatagcagtctgaatgaatggagacagacatgatggaatgagcattcaaatttattcattattcaacaaatacttatgttctagatatagttctagatgctggggagatcagaaaacaaaccctttaaaaaaggagtgcagtgtatcaggtgatgggaagtgtaatagagaaaaataaagcaaggtaaggaggtagaaagcatctgtgtggatgacacttctattttatgtggaacaggcaaaggaaatcctctctaacaggtggtatttaagtatagagataaagggagtacataggaagatgtgtacatattccagagataaggaaacagtaggtaccagagccctgtggtaggagggtgcttgtcatggtcagggacatcaggagatgagtgtaactggagcagagaggatgaaagaaaaggggtaggagatgaggagataggtggccagctcatgcaaggacttatagtgtgttgtcagtactttggtacttactctgagggatattgaaacctcaggaaagttctagcagaggcctggtattgatttaccttacattgtaaaaagctgatgtgttgagtatagatggttaggatgcagggcaggagctaagagacctactatgaagctattgtaacagttcaagcaagaggaagtggtgaatgagaccagggtggtggcattcaatgtgaggagaagtgtaagaaggcagaggctacaggatttgctgatgaatgggaaaggagaggagttgagaatgatgccaaggtgtttggcctgggaaaccagaggacgccactgtcatgtattgagtgaggtaggaaagactgtagaggaacaggttttggtggagagaacctgggaatggcagatacagggttcggttggacaaattaagttggagatgcctgctagacacccaagtggcaagactgagtaggcaggtgtatgtatgagtctggagttcagggaagaggtctgagctggagataacaaattcaagatctgcaatgtattttaaaccacgagccagatgagatcacaagggagtgagtagaaatagagaagagaagaggtccaaggtgagagctccaagctaggcacatgagagggacatgaacacacgagccagggggagaagaaccaaggaagggtagtgtcctggcaaccaagggcaaaggtatattgaggaggagggtgggatcttctgtgtttaatgctgttaataggtccagtcagatgaggactgggaactgaccatgggatttattcattgaacaaccagtaaatacactcaatgcagaaaatatggggtaagcgttggatcagtatgcttgagtaggcaggaaaggaggagacaatcgtgtgtcccagaggagaagttggtcttggaaatctggatggctcatccactgcagcagaaggaaggcagaaaatatggatttggagtgggtattgattgggagttatgagtatgtggaaattctgcgatagattctgcttccttaaggaaattgtaagccacatcgtcaacagagaaggaggatggggaggaggtgctggacgttgggacagagaaaagaggggagaaacacacgagagtgggagagtgagtggcctctggaaaagcagcagggatggcctggccccaaggcctgtacataatggtcttgagtttaaagtgagacctacagcacgggtgtgtgtttttctccagccactaccacgacaagtagtggatggtatggctgatggcatgccattcaaacctgggggtttttaggaagaagggagatggcaatgaagagcaacctccacgccccattatatgaaaattgtgtgagagaaaaaagccatcagctgtgagggctggaagggaaaatgtgtcctcagaagagagccagttctggttggagtagggaggtgacaggaaggctcagaaaagatattgagattcagaactttgttaatgtgcagtgagtcacagaggacacagtgggagaattccaggagttggggaggagtgggagagaatcagattaggggatgcctggaaagcgagctgggttgcaaggagtgacctggagtcatgtgtcttatggatacagacagggatgagaggtatgagggattaatccagatggtctctaaggcagctaacaatgttaagactgacagtgttgggggtggtaggggatggaaaggtgtgtgggatctttcctggaatactcagagctctggggcccccacttgtttcctgttagtgaaggtggggacatatgaagctgttgatttcctttttcattcctgcaaatggaggagaagaactaggagccagagtttgtgctttgcactaggaacacaagctggatcagtgggctcctgccttactccatggtgagactagactgtcatatgtgggtgacctggacaggataaatcataccatctgggccaggcagactggctcatgtctgtaatcctggcactttgggaggccaaggtgggaggattgcttgagcccaagggtttgagacaagcctgggcaacatagtgagacccatctctaagaaaaaattttaaaaaattagctgagaatgggggtatatgcctgtagtcccagctactcaggaggctgaggtgggaagactgcttgagcctgggaggtggaagctgcagtgagccgtggttgtgctactacactccggcctgggtgacacagtgagagaaccaccacccccctcaaaaaaatatatctcatctggacactgtctctctgcatttgttgactctgctttcttctaagttgtctgcattttcaggcagattctctccataccatgatgaagatggacctagcagtaccagccttacatccattcatgtaaccgcctcttaagaaagaaaccttttcccaatgagtctccagcaagataccttgagctcctctctctggcatggcttggttcatgtacccattgctgactcaatcactctggtcaagaagatgtggggctgcaattttccaggtagatcctcattcttggaattagtttataagaatgagagtgtaggagggtgggtccccaaaggaaaaaattaaaaggtcttgtaccagatttatttggaagaaatctgagtgaggagatggaggacatgaggacagtgttttcagccttcctctgttatcctcagtaattctacattggcccagtcttgcacatatgttcagccaaacaaaagcccggcagttagtcaggcccacccatgggatatgggcacctggttgagcccatagccagctatgttgtctttgctatgggctgtatgtactaagaggaagtaaagcctttttattcctataaaacactgtgtgctggtcaagccatgtatctgggaggctgcattagccagaaataagtgtcttttcttgatttgcattaaagcaatgtaaaggctagtaatggtcctttttcttactatggaagatgtcaacacctggtaccctttaattgctcagggccaggtgacccagcttctatgcccctggaagagaatactcaccctttgggcttccataaatggatcactgatgaatgctccaattcttcacctttacagctagagatagataggaaaaatacccctttaccaccaccacctcccaggtaccttttaaagcctaaccagggaagtgagttgtccagcagaatagccctgaagtggctcctgcccatcctccctacccacataccatgtttcatcacaagaacggacacaactcatcccagatcctcccacattttcccttgggagactttatagatcaaccccatgtgggtcattaagattttttccttaatccttaatccccattagataacccaacactgcatgttcccttatcctcacactgctgtgcacatcataaagtttgaccttcttccattccttttcatctgtccaaacccctccaatatgttcttaggagctcatggtctgtcaccagcagatgcaaaatctcatctctttccctgaatgtcccctttagcttctcactccaactgcaaccttgctctccccaaggacactgcctccctgcaaccctttcaggtagacacctttgattttatacctcatggaccttaaagcctggaaaaagggtaagtctcttccttactgtcctttgctgcttctaattaatcatttctcttactttcaacttcaaagacctcagcccctttgaagcacatcatcagatgttaccacctgctaccccacctggctgtcattcactgaccttagtccttggtgcctctggcacttgcttgctgcctttatctctactgccaatgataatgagagttggcattagccaagtgctttctcttctcctgaaactcttctaagcactctaaaagcattattttatttaattcctacaatgccatgagatagttgctatcatcctcattttatagatgtgtaaactgaggtgtagggggataatttgcctaacagcacacaccattagtgaaagggtcagggttggaaacagtctgaccccacggcatgtatactgaaacactacattaagctgcttccttgtcggtgttcctggcaacattaacatctatgcagttgacaccctggcctctctgtcccttgacctcctggtttctctgccctattacagccacccaaccctgtggtcatacccatgatcttttcatcagttacaacagcaccatctcaaaataccaatttcatgttttctcctccttgatgtcacctcctgtctttacaactcttcaattgtagtcctcccacttcagaaatttcccagccttattgaaaatctcaaatccaacaattccattgaccctgccactatttcacttatatcagcagccctggaactctacatttccttttagtggatgacggcatccgagcggtgggaatatttcctgatccagttatacattgctatgtagcaaatcaccctgagggtgattcaaaacaacaatggttttatttgctcacaactctatgggtcaaaaatttgagcaaggcttggctggatggttcttttttctctacatggcatcagctgtggtgttttatgaggttgtagtcagatggtgactgaggttgaagcatccaagatggtttcacttacttgtctggaacctttgtggtgatggctgggatatgtctctctctgtcattctcttcctacagggctgcgtccaggtgcctagcctgggcttctttacatggcacctggacctcaagagtgagtattctaattagcaaaggtagaagctgcagactgcttaaggtgcttctccagaagttacccagcatcacttctgctgcattctatttgtcaaaacaggatacatggtgagcccaggtctgaagagaggtgaaatatactccacccaaagactgtactgcagaagagcatgtggaatgatgaggattgttgtgcagccatctttggaaacctaatttaatagtgacacagcactatgatttctccttgcaagcactgtatctcccttatcctctcccctttcctacttatatggcaatattcctgacctggtcaatcccaactatcagtaggctccatgcctgcaattgagaagctgaatatttccggagaaaaatcacacaacttccctaagtattctgacttttacattattaccaaatagtctctgaagactgctagacaatcttatcagtttcctggatgttcactttccattttaagtcttgtctccctccttaaatcccgaatagcactccactcctctagcctacagtagttaactaggtaactaacccactcctctagttaagcctaccctggggttaactttatctcactatttatagagaaatagatacaatcagattagaagtacctcatttttgtaccattatatccctcaatttacatgactgcatttgcaaactttgccttgttctgctgaagtggaaaaataatttctgataccatccaaggcaaaccctcccacttgaacatggtatcctccatcttttctcatctcatcaaaaatttcattcctacaaatatctcttttctctccaatatcatcagtttgtctctatgtaatggatcattctcattggcatactaacaggcttaatatcaccaccttaaacgaaacaaatgagtcaaaataaaacccctctttgactccgtgtcccccctcagccaccaagacatttctctgcttctcttcatacaactcctccaaagaattatctatacttcctgattctaattcctcacctcctgttcccttttcaaggctttccaattgagcttctgtccccaccactgtggaaactgctcttatcctactgaagcctatggtcagctctgtgtgttcatgttacttgacctttcagcagtatccaacaaagctgaccttcttgaagcatattctcttgttttcagtggcacagcaactggcctggttgacttcctacctcatcagccactccatcatagtctttgctgatttcccatcctcttctgggtctctgaatgttggagtctccctggtttctctctgggcatgtcttcttgttggtgcactctcatcttggtgatcacatctaatcccatggccttaaatgaaatccttcctctgatgactcctaaattatatctctagttagagcttttctcctgaatcccagacttgcatattctgctgcttatttcatgtctccttttgaatgtctaacaagcattttaaattcaacatggctaaaacagaacaatgggttttagctcctacttgtaccctcaattgctgcctctcaccttttcgtttgagcagagggccccaccattcatgtagtatctctcaaaaatctagcagccacagttgattccttgctgttctcaacagtctgcatctgtccattctcaagtcgtttttttctacttccaaatatattctaaatttgactgtttttccatctccactgctattgccctagtccaaaccaccacaatacctggctgtctaccctactttcactttcactggttacaacttatgctgttactaattgggaaagacattagaaagtggttaaaatcacagcatgtggcataagactgcctgattcaaatgacaaacttattaaagtgagagtcaacttattgaagtgaatatcacatcatagcactctcttacttaaaaccctttaattactttgcattgcaattgaacaaaataaaattcttaatcatggctttaaagacccaataacatctggctccccaccaaactttctggattccactattgcctcccccttacccactccatttcagccaactggcttccttttgagcgagttggagtgtaaacacttcaagttccttctggtctcaggactttgaatgtgacacttttgcaaagtttcgagtggctactttctcttcattcacatctcagttcaaatgtcacctcctcccagagtcctcttttggtcactctggataaactgaattccacatatccccttttgtagccactctatataacattacccagtattcttcatagcaattactatctgaaattagtttacccaatgatatagtttggctgtgtccccacccaaatctcatcttgaattgtagcttccataattcccacatgttgtgggagggacctggtgggagataattgaatcatggggctgttttcctccatacttttctcatggtagtgaataagtctcacaagatctgatggttttataaggggaacccccttttgcttggctctcatttctctctttgcctgccaccatgtaagatgtgcctttcaccttctgccatgattgtgaggcctccccagccatgtggaaccgtgagtccattaaacctccttttctttataaattacccagttttgggtatgtctttatcagcagcgtgaaaatagacgaatacattcatcaaatcgtttccatgtttactattagtctcactgaccagaatgttacctttttgaaactaatgactgaattttgttaattctcagaacctcgacaaggctgggcacatagtaggtactccataaatatttattgagtgactgaaccagtgccttttgattttttgaatactgtaagtttcaattcaagagcatgagaaaagtctcaaatagcatcaaggcataaaataaaaagtaaaattatacttttgtctgctttcaggacctcctttaccaggtcctactccctagaactaagttggttttagaagttatagaatttagcactttacattacccctctcttctcctgacattaaaaatcttatgttattatttaaaatgtcttctttgggttactttcataatcataaacagcatgcttaaaccactatttcttggatacctattatgtaagaagagaacatgtatgcctcctacacttccttctactcttctctggcccctcctcctcagctttgatcattacttttacatgatcaaggtttattacatttatattccaatctgtaactataattaagtcttctgtgctttgacgataggttagtttcttaaaattgaataccattaaatagcaattggaaattatgattatgtaaatattattcagtggagaaccaagtggtttgattagacttgtagagaaggaaaaataatcctaaatcaccaaacctgtggcactcaaaggcaaaaacttcaatcttcaaggtcaaatggattttctgttttcagcttcatattccgtcttcatttgctcaaaatcatactgcattttaatttgctttggcttgacatacaacatttcttgacagctttgttttgtttttcaaaatcttgaattgtctctcttttcttgttgatacaaaaaatacaataataaaaaccaacctttatagagaagttactgagaaccagacactaaatattttacatgcattatttcatttaatagccacaatgactttatgaagtataaattattattattatttttgaggcaaagtctcactttgtcgagcaggctagcatggagtggcacgatcttggctcattgcaacctcctgggttcaagcgattctcctgcctcagcctcccaagtagctggttctacaagcatgtgccaccatactcggctaatttttttttttttttttttgtatttttagtagagacggggtttcaccatgttggccaggctggtcttgaactcctccctcgagttccaaaggcggatcgagttgatccgcctgccttggccttccaaagtacggggattgcaggcgtgagccacggtgcctggccccaaagtataaattattttatacacatttttcaaataaggaaactgagccacagaaaatggaagtcattgcctaaggtcacatatgtagtttgtgatttgagtcgggcagtatgattctggaggctgaggttttcaccacactgggatatctttacttgattagtaagcttatcaagcgtcttagttatactactattgaagtaaatatactattattacttcaataatagtatagtaagtatactattattgaagacctttttaagggaggcttctgacttcctgtttagatttgtacttctggttttgatactgatgcatggccgtcattgtgagattttattttattgcacttctggttgggtccatgtctttctctttcttccattttatttaacttttaactgacatcaaatgacaaataagtttttcagaaagggtaactgggaagtaaaatttccaagtgcttgcatgtttaaaaagtcattgtatcctcacacctgatagatagtatgactagctatagaatttaggttgaaaatgaacgtctatcagaacttaaccagcattgctgcatcttctaacatccagtatgattggtgaaaagtctgatgccagttcttttgcatatatatgcacacatatatattaatacacatacaagcacacatgcatacacatatatatgcaaaagagatatgtatcttgttaattcccagagcctagacaaggctgggcacatagtaggtactccataaatatttattgagtatatatatatatggcatatatatatatatatgcccctttggaagttttacttcttctgtttattgttgatatttcaaaatctcatgagaatatatttaggtgtaggcctttgtgttcagtaattgcagcatccaagatgggcttgctactgctctaggagttttttttttcctatgggtgttttatttcctttcttccaactccttttttcctcatctttgaactcctggtgggttggtattagaatccctggattgaagtagagctatgatacagtttggatatttgtccccaccaaatctcatgttgaattgtattcccaatgtgggaggtgggcctgannnnnnnnnnnnnnnnnnnnnnnnnnnnnnnnnnnnnnnnnnnnnnnnnnnnnnnnnnnnnnnnnnnnnnnnnnnnnnnnnnnnnnnnnnnnnnnnnnnnnnnnnnnnnnnnnnnnnnnnnnnnnnnnnnnnnnnnnnnnnnnnnnnnnnnnnnnnnnnnnnnnnnnnnnnnnnnnnnnnnnnnnnnnnnnnnnnnnnnnnnnnnnnnnnnnnnnnnnnnnnnnnnnnnnnnnnnnnnnnnnnnnnnnnnnnnnnnnnnnnnnnnnnnnnnnnnnnnnnnnnnnnnnnnnnnnnnnnnnnnnnnnnnnnnnnnnnnnnnnnnnnnnnnnnnnnnnnnnnnnnnnncctttaataaagtttgttgaacagaatggatgacaggttgatgacaatatatgagaggcatctggaactttccaaattaaataggcaaacatctcctttgaactgcctgtacacatagcctaacagctgccntgccatgaataatgaatgtacttgaatgcttcaaatgcttcaagtactccaagattttgcttcagggccatctttatgaacatcagttctccttgaactgtgctattgatagagaaggggcaggagactggatcaaactataagtaaataaagatacagcatggaatgtggttttaagaaacaaattcctggaatgttcctttcaaaaacatttgaattcatcaaatctacttgttttatttttgtgaacattctttttacagtcttcaccctgccctaatctgaagggtgggagagggagagatttattgcgaggaattggtggcttatgtgattgtgaggactaatgaggcaagtttggtatctgtagggcaggccatcagaaagcgcaggctggaactctctggcatgagctgaagctgctgtccagaggtggaatttctctttctttcccagaaatctccattctgttctcacagcctttcaactgattgaatcaggtctacccagattatctggcataatcttcttaaagtcaactatttatgaacattaatcttatctacaaagtatacctccacagcaacacccagatgagtgtttgattgaatagctggggactatatcttagccaaattcacacataaaaatggccacgataggccacacttgtcaacctggcacccatatacgtctcattaaatcacatttaatctccaaataaagacaataacaaagtcatacttcctcttactgctacaagtatcctgcatacaactgaaaacacataacctttctccaaaagagaatcaaagttcttacataattttcattttctttggattttctataacttattactgtgatataactactaatatatcttatgttagatgatggcataagagagggaagaaaacaaaaatatttgcataacatatatattcataacaaaataagaaataaccgttaaagtcctcatttctgcaactggtcatgttgttgtagctggtgtttataattacctttttccactatctattccatattctatttgcacttagctagttgtggttcttgggcccacagacgaacccaaaacttctatctagccagcagcttccagataatggggaacagaagaccagtgaattccttgagcatgagcctatttttgtacttcatttgctgtgaagtgagttccttgatcagaagcaatgctgtgtggaataccatgatggtggataagacattccataagtccatggatggtagttttggcagaagcattgctttcaagggaaggcaaatcactatccaagcaagtaactgttccaataagaacacagtgctgctgggtgctgtggctcacgcctgtaatcccagcactttgagaagctgaggcaggtggattacaaggtcacaagatcgagaccatcctgtctaacatggtgaaaacctcgtctctactataaatacacaaaaaaattagctgggcatcgaggtacttgcctgttgtcccagctactctcaggctatgcaggagaatctcttaaacctgcgaaggcccaggatgctgtgagcccagaaagtccactgcactccaacctgggcacagaactttactccttctcaaaacnnnnnnnnnnnnnnnnnnnnnnnnnnnnnnnnnnnnnnnnnnnnnnnnnnnnnnnnnnnnnnnnnnnnnnnnnnnnnnnnnnnnnnnnnnnnnnnnnnnnnnnnnnnnnnnnnnnnnnnnnnnnnnnnnnnnagctcatgaaacttgtaccttaatcccttatccttcaccctaagaccaaatgatgtatataaacattttgccttattaagaaagcaaaaagattccaatgcttgtttatagttaggtttgggagtaggaagggggaagttttatgtatctatttacttacttgtttttaacatctctaattttgcttgaacattccttaacactgctccaattttattttcaatatatcttatagacaatatattaaaagaataaaactcatgtgatataatcaacaaatgacttgatcattttctcctcctacccattcaaacccattttgccaaggtaatttttccccagccctctagatgaaatttaaggcaagtcttgtggttttatggtcattcatcattaattttaaaagtttccaactacttgtgataataaaatcagttccagtttagttaaaaaaaaaaaagttttatttctcgccctatgcaatagtcacaagatttaacttcatttagaattaaatcttcctgccccctaaatcagatatgctcttgagaaaaaaaatagatgtggtcaactctttttctctttctccatttggagtttctattctccttctttgttctctaggctacttccaccccattttggcttagagagcagcaagaagtaaaggacagaaatgttcttactagacagataccgtcatgagttagtatgttatgaaggttaaccccagcaggtgtggagtaagcctgagctgttttactcaaaagaattttaccagcatggcacaattccggtcaacaactgattaataatgtcactttataaccacatgtccaaggagcttttgggtgctttttatcagcttgtcagcattatttattgacagcagtaagattgattatttggacctagtcttagtaagactgccctccgccccctgccccaaagcctctgccattgcaactggttgcatagcaaaaatatacctatatcatcagcagggtataagaaaccccagctgaaactccactttgggctccctggttactaggtattccgtgaacacatcagtggttcctgatctgagagagcaagtgcagcctgccatggcctgacagagggaagacgattggagcttgcccttggtgtctccagaccccttgctgggaggtagcctttgcccaagatgtacatccttgctttaatgatgatgctatattttatccttttcctataatagaatatagatccataggtattgtcatttggggtcctatgagtctcctttagtagtaagccccaaaggccacattagtgtgattgatgtcagtgctttctaggattaatagctacatacaaccgactctttgttttgaggggcattttttggtttcttcagagacacaccgacccccactgtactgggtttctcccgtgcgactgagtccagcagtacccaacagcactctctgctgggttcaacttgcccttccaggcagtgttcttggttgctatttaagagaacccctcatttgttttctcacacacctgtgcaacatctggtcaaaaggaagcatatcagtagaacattttctttcatgaacaaaaaaaggaaatgtatattctctgccccagtcaacttggggagtaaagtcatcccctttgcagcaatatcttttcactcctctctcagagaagcaaagcaacaatagtctcttgcctttctgatgtctcaaacatgactcaggtgcctgtccactgggccacatgtcaagcccactggttgccccattgaagaccttctccctaggctggagttaaaagaaaaatgcttcaactttcccaacaaaaatcttcttctaatctctatttaacccttttataaccttgatggctgaagaggataagaaatccaaaactggttttaaacacctcctttttcaagccctgcatggcagtctcatacctcactttgtagtgtaagttatttcatggtctagagggtctagctgaaactaatagcaaaaaaaaagttttatttctacatcctattacactaatgtaacttggaaattaactatttcgacccagatcaacctgatcctaaaatgcatattctttttattatggcagacaacctctaccaatgtaaaattaaggatgccagttcaaattcatttaatacttttttgacagccttctgtttgtcctaaaagagatacctccaaatgtgtatgagccacacccttcattcttactgtctttttttctactttatgaagaaaagagaaaccaaggtgnnnnnnnnnnnnnnnnnnnnnnnnnnnnnnnnnnnnnnnnnnnnnnnnnnnnnnnnnnnnnnnnnnnnnnnnnnnnnnnnnnnnnnnnnnnnnnnnnnnnnnnnnnnnnnnnnnnnnnnnnnnnnnnnnnnnnnnnnnnnnnnnnnnnnnnnnnnnnnnnnnnnnnnnnnnnnnnnnnnnnnnnnnnnnnnnnnnnnnnnnnnnnnnaatgctttgtgctttgattagcatcaggtctgtgaaattcaaacttattatttcctgccagttttaatgaataataaaggtaaaagagctttatgcaaaccactaatgcttctactcatcactagagctttaagcaggactctaattcattgacttacaggtcttccctgaacttcctatcatgtatatcatacacacattcatgggtgcatgcacacatacttccactcacttcctctaccgggctcccagctacggcctctatggtgttccctgtggtacttgggcatgtctgagcaagtctgaagcctggtagcaagtgacatcagggtcttcattcatgacatttcaaggaattttttagagggcaatttaatgtaaatcaaagctgaaattttaaataccctttgacccaacaatttcatgggcagaacttttattctagatgtgccacaaagtatacatatgaaaggtattctactaaaacaaatgaattgccataaggttaagtaaatcatagcacagccattttataaaacagcatatgtgctgatatggaatgatttccaagacgttattgttaaatgaaaacatcaagttgcagaacaggatgaataatgcgcgaccattctagcaggttaaataaggaactggtaatatcactgccttttaagaactaggggacctgactgttctcttttgtaccttttgagctttgtacatcacatatgcattatttaatttggttctgaataaataagattcctatgaaataactcattccaagtactaagctatcaaaggagtaaaaacctgaaaagctgttatttttatcataaactttcagagatcctgaaaatacaaagggcagcaccaatagcttctgggttatttatttatatcatctaacatacacagatgcgaactatataaaaagtcttgaaattcagacaaatgactcagtcccatccatcaaacatctagtagaagacagctaaaaaaagaatgatttcttattagatagcaaaatatatgataaagctctaataactagaacagtgtagtattgacccagaaataagcaataagatgaagaaaaacctaatacgaggtacagaaacagacccatgaatttctatatttagaaacttagttaataaaaatggcatttcaatttggggtaggaattaatgggccaactgactatcaatttggaaaaataaagaaaagtaggtaataacctctaacatatacaaaactaaattcaaagtaatataaactgctaaacaaaaaaaaaaatatgtaaatcttggcatatggacagtcttcctaagacagatgcaaaccgtaaacaataaattcactacataaaaatatgaaacaggacaaaagacacaataaaccaaattttaaagcaagattagagaaaaatatgtatacacactttgtgttgtatatcagactgaggagtattcctcagaatatacaaagaactcttaccaacgtatgagaagagaaaaaactaccaagtacaaaaatgtgccaagaatatgtagaattaaatatgtacatcttctatccggaatttctacttttaggtatctccacaaaataagtccttggcatttatacataagaaggtgtacaaaacaatattcactggggcactgtttgttactgcaaaacactaggagagaagggagagaattatgacataccagatggaaatgagatgaaactcctgtcagcttaaataactgggaggaaaaaaaaatattcattaatagaagaagagttaagtaaatgacagagcaccaatactagggaatactctgtggcaattatactctacagaaatgggtctatatgcatgcacttacaaggcaatatttccaagatgtgttagtgaaaaaacagcctggaataatagtctaattagcaaacagtgtaggattaggaaaactagatcaagaatgctttttggtttatctgtattactttaattttctacaacaatactatatgcatgtgttctctgcttattaaaatcaatttaaaggtatgaaaaatgtaaatgattaatatggacacttgcggaattctgtctaaataaggaggacccatgaaagaagatgtctattctgagggctgtcctgccttcaagatgggagaggggaaaggaggaagaggcatggtcaagaaacacttcaaagtagccacatttgagtgaagtcttgaaagataagagtttttgaaagataaggagacatgattggtgctggtctgtggggcaggaggtggggctggatcactagagtacagtgaaggccttccagttgaaggaagcagcctggcatcttagaggacctataagctattccacacgagtctgggccacaatcctgtgagaatggggagctattgaaatcttttaggcaaagaatataactacatgggttgtcaggagaaggggtgctagtaagaccagcggcagtgcaatatcccaagagagaggtgacaagagatgcaactaaggcagtatcaggtaggatggagaagacaggtgctagataagtttcagaattaaatttacaaagttggtaactgattgcatatggaagttaaggaagatggaaaggctcagaattaccccaagtttaaggtctnnnnnnnnnnnnnnnnnnnnnnnnnnnnnnnnnnnnnnnnnnnnnnnnnnnnnnnnnnnnnnnnnnnnnnnnnnnnnnnnnnnnnnnnnnnnnnnnnnnnnnnnnnnnnnnnnnnnnnnnnnnnnnnnnnnnnnnnnnnnnnnnnnnnnnnnnnnnnnnnnnnnnnnnnnnnnnnnnnnnnnnnnnnnnnnnnnnnnnnnnnnnncttcactgcaaaagaatttccatctcagctttataatccaattaaagagatcgagcaaagccactgtgcttcgtgttttcttttttaatcatgagatgaagatgattatatttttgttttgtaggctccaagggggagtattaaattcttggttatgttcttagaggctacattttcctcctaattctattgctcttaagaagagtttggcagagaccttcaaagccgttgtgtttcttttattttgcttccctggagcttcgcaaaatggtaacagctcatgcctcctacatgaggcccacctcctccccattgagagctcatatctcaccctagctttggaactgcaacaatggcattgcggagtggttttaaatttgtttttattacagcactgaaagctgaatatatgagatgcaattatgtccatcgtatacacagttctgtttcttggtgaatttcatctaaggagtaaatatgtccaatcaagtttctgcggatgcctgtgacgttggtgcagtgaactatggtaacattactcctcctttgggggacacgtgctatacaaattttgcatcatgattcatagaatcacagactgttgttgctggaagaaatcttagagaacttaatcaagccttcctcatattacaggtgaaaacacaaaagcccaacgatacttcctgtccaagttcacacagccagttggtggtaaagttggggcaaaaattcaggttttctgatttctagtccaggactgcttgggccaaaccacattgctgcattattctatgggtttatttaatatattatattgcaaatattttgctaattatataaaaacaagttaactatctgaataaatgaaaagatagaccatgttggacggagaagcctgagcagtataaacatgttagttttcttcaaattaatttacaggcttaattcagtaggttccatagattagggataggaaagtgtacagttaaattattctgaagtttatgcaaaagaataagcagtcactaattgctttcaaatttttggaaaaggcaaatctaccacatataagaataaattataaaaatacattataaactaataatttttataaataaattataaaaatacattaattaaagtacagtactgctttaggaggaagcaggtgcataggttagaaaatattgatatcattgaagcagatcttaatgctcagttatatttcaaaaataacatttcaatttggtgggtaattaaaatataattcagtggatgatgttggtacaactggccatttgttaagataataaagttaaatctccgtaccacacttgcacaaaggtaaattacagatgttttaaagatttaactgtcaaaaatgccaaagcaaataaatccataatacaaagtatttaggcaaaaaaagttaaactgatcaattttctaaaattctaaacaaaatcatagacctgaacattgtttatacttattaatacatgtatatctatagctatttgtatatataaaacagaagagtcaatattattcatctctaaaagtcttacaaataaattagtaaaggagaagcacgctaacagaaaaaatgggcaaaagatctgaacagggaaaaatcacaaaagaagaaatgcaaatgaaatagatagatatttaatctcactaagaattaaaaaaaaatgcatggggaaacactgaaaaatatttcctcctatcatgctaatggaaaatctttttcccagcccttttcttttaagataataaagtttagatgctagttcaggcaaagggggattcttacacactaacaaaaagggtatccagtgatacactctcaacagatgggcaatttgccattatgtatcaaaagctccaaaacgtattgaaacactttggcctatatctgccattttaagaattaattcaatgaactaataaatgtacaaaaaagctttatgaataagaaattcctcatagtattattcataatagaaaaacttcaggaatatttcaaacatcaaaagcagagaacagttaaataaactataaatagccatgtgataaacatcatgtaaccataaaggatcatgtttttgaagaatatttaaagacaagagctatgaattttttagtcaaataaaaagtatatattgcatgctacctatttcttctcaaaaaatcagaaagacatgcactgaaatattaacctttttctgagtggagaaatattgaatgatatttaatatttcagctcttctgaatttttcagattttcacaataaactaatatttatgggagaaaaagtatgctattgtaaaataaacacagaataccaagttagaaagatgccagagctggtcccagcatagcatgcccagccccttctctagtcaatatagatacaaacaattgttctatgctgtgagtcctggaggtccactggactgttaaaggttatggctggggaataactctgtgagatactcagcagctggaggggatagttcatgttgctggtgtttgtgggggaaaataaaataaaatttatcaccattaaaaaacctctagggcagggctgtccaatcttttggctttcctgggccacattgcaagaagaacaattgtctggggccacacataaaatacagtaatactaattatagctgatgagctaaaaaaaattgcaaaaaaatatctcataatgttttaagaaagtttgtgaatttgtgatgggctgcattcaaagcccccatgggctgcaggttagacaaacttgctctagggtatttaatgtacgcaatctttacaatcagcctcattaacccatgggagaactatcgtctataaaacagactccccttcacattttctcctcaagccacatgttgactttccatgatgtcttttccctaaagtcttcccatgatactcactttattataatttcacttagataaaatgtaaaactggcccccaaatacatataacccagagactttagtgaaatcatataagccaaaagtagatgtgactctattagggaataagctaatggtgcatagaaaactgaatctcagagtgcaaagaaaataaggctcaagcagaagttggaaccatttttcctggaggagatgcagagaacctccaagctcagagtgaaannnnnnnnnnnnnnnnnnnnnnnnnnnnnnnnnnnnnnnnnnnnnnnnnnnnnnnnnnnnnnnnnnnnnnnnnnnnnnnnnnnnnnnnnnnnnnnnnnnnnnnnnnnnnnnnnnnnnnnnnnnnnnnnnnnnnnnnnnnnnnnnnnnnnnnnnnnnnnnnnnnnnnnnngatgaaatgtattatgcacgtaacccataaaactgttctcaatttcttttggtgttaagacacagcataagaaactagtctatttctggagtctcttgaggcaatttgcatatagaatgtttattgcaggatggcagatgtctctttgaataagtggagccagttctgaatttcgcctcccatctctgtccaggctaccggcatctggagtatgtgcccatgctgcattaagaaaaatgattcaagcgattgagaaacagtattaggtcttcctcacagaatttatataattttaatttaagttgtagcaaattgatgtaacaatgctgaaggtttctgtgagatgagccccatgaggaactctttcaaaatcaagagaaatatttggttttcttccagccccagaaacctttgatttttttttttaaagatggtataacataaattcactctgtttgtatacactgagatcttttcccattttattgtgaaagatagcttactgtgaaccctcatttacagctagattctaggaaagcatttaattatatgccaggggatgaagtgagggtttatgtgggtcaaagagtgacgaagatcctatgaaaagcgataaggatcgaaagaggttcatttgtcaaattataaaaccaaacagataattttctttgacttcattcttacctaagaaagatgtagtgtgaaccaatcttcctgtaaacagaacaattgttctctctaggggtcctgggaaaggggaggaggagtagagagagctccacaggttacagctcatttcggacttttcattgcaaatgcaatggtggcagtggacgaggtgcactttgtcttccagctgctttcgcggctatgccctaatgctgcacatgcccaccagcctctgctgtgctggtcacttttccagccaccctccatgggttcctagtgtttctcaagagcaagtgttacctcctcagggaggccttccatgaccttgtcatgtaaatgagatgtaccagctgtatacgctcatgatattttgtgggtgtttccttttcagctcccaccactgtccgtaaacgcgcatttatttgtgtgcttaattggcttctctggccaggctctacatcccagtcagggttcactgatgcctttccagcacctgaaactggcctgccacagagaaggtgccagtaaatccttggggacaaatgagtaagcttcgtggttttccaaggaagactggtctctatccccctgccttgtccaggcagaattcgccaccagcttgatttccatctgtctccttttgactttctcttttcctttctctgcctttcttttctttcccatgttcatttgtaacaactttattggtttccttgttttttctcccatgttgctctagaagaaaacagatgggtagaggatttcagatgaatactgaatatcacatccccattgatgagatcatttcagaattttctaaaattattcttcacggtcacatggccagggagaaaatatgcctgggtttttgagagtcgggatgctgctgcctggcttaaatcattattaaagagacaaaggctcaccaggttaaaactgctggaaagttttctctagcagtagagtacattcaataaatagtcctcacctggaggaacgtggggtgagagctccttcttttgtgtgtgtgtataattatttgtcactttatctaaatgtcatatctcggagagcttatctttctttagacatttacaatagcatctactatgggactgccaacagattgcttggcctgggagagactttttaacagtgcaatgttaatagcatgagattttcccctcttccctttataaaaatgtgggcaaatgtgtcagaagggcaatgccatgccttgagcataagaaaggcgttccaggtattattgcctgtttgctgtgtttgattttctccatccttattctctggaaaatgaagtgcttgtggatttggcccttccaggtaagcaatctgatcattgtcagggttaagctcatcggttggctagcatgatattagaaggtgagttgctggattcacagagcaagcaaacacagtcatagtacctggaaactaaatatcctctcttcccagtgatgtccatagctgtttggctgtaggtcaactctctccccacctatatctcagcccgagaaaggctgccctggtgcaaagctgcagcaagtctcagcatctcagtgcaggcagggaggtctgtcagtaacctagcaacgtgacaacaaaattatcctcgtgctgttcagctttcaaataatgaaatgatagtcacaacattttgcatttaaacagcacagtttccaaggaccttaatgtcagttgtgaatagaggaaagaaatcacaagaacctgctcctccagggctggctgattccattatacagacaggtaagcagaagcaaacagggcacagagggccatacgacatgagcagaattagtgaggaagtatacagaaaaaacttctaactgctagaaaaaactaaaggaaaagagctgtaagctagcccattttttctcattaaactttacaactctaaagcagagattgtgttcttcatctattttgaaaagtactaaccttactgattgttaaattatagatgaattcagtgggtaggtggtctatcctacagcctatctactgaacagggaattagctataggagtctgcaagacattactaattttctacgtgtgtgattattccgtgatcgttttctgaaaatgtaactaatttctgatccaaaggtagatactgttgtttgtctactcctttgataacagtggtggttttaagaaatgatcacaaattttttgatactctttccatggaggcatagggtttttatactctctcctggagtctgggtaggcttaggactgattcatccaatagcttatgactgactcatctaacagaagtgatgctatatagcttcctaggctgaattataaaagaggatccaccttctttcttgttcaatggaacactcatatttggagcatagggaagccatataaaaagtctgattatcatgaggctaccttgctgtttggaagtccaagccacacagtgagggcatgtgtgggtgctccagttaaccatcccagctgagctcagcctttgagtaattcccactcaggtaccagacatgtgaatgaaaaagcctccaattattctgcacccccctagccattttaatcttctgatctgaagccccagatgtcataaaacagatgccagccaccctgctatggccttgccaaatgatctattagcataattaaattgttgttgttttatgccacttaatttaaggaattttcttaagcaacaataacaactgggacaccaacagaaccccaatttttcactcttctctgcaggcttatgtcctggataaggggctgtggccctttctcaaatcctgagggcgaaagtttatttgtctaaggcaatatggtcattttatttgcaatatggtcatttcatttcttttgtaatgtgtttatattgggtatcaacaggtgatgcaattctggccaataagacgagtggagaagttgactggggctgctttgggaaaattccccttagtctcaataagatttgtaagatgggatagattatcagtgctacctttgaatgttattgtttgcatatagtgtttatacctgtggtacccatcttatggctgtcaggggagccaccagtctatgggacaggttgaagagaagaatggagaagctatgtccttgatgatgttcaacactaaggatgctcaatcttggaactacctccacctttgaacttcttgctacataatataatattctcattgtttaatcctttttgtggagggtttaaagagattcagccaaagcttcataactgatcatagatgtttcagagcaaatgttctggtcccagagatctaggtttaaattttggttctgccacttattagctatgaaattttgagttgttctgtctctgtttcttcacctacaaaattaggataagaatgttttcattatgaaattcttataaagataaaataatttatttagtaagtacttaatcagtgcctgctatgtgccaggcatcattcttggcactgggggaaatggctttgaatgagacaagcttccaaccctcctggtgcctagatttgtgtaagggagacataaaaaatgagtaagtgaacaagagaatcttagatagtaccaagtgctataaagattaagtgaagtgaggtatgcaaaatgcttagcatgggcctggcacacagcaagcaagcagtaatgtaacttagttggggctgctataacaaaatgccatagactgagtagcttaaacaaaaaaatgcatttatttcccacagttctggaggctgggaagtccaaaatcaaggcactggcagatttggtgtttgttgagggcctgcttcctggtttatgatggctattttcttgttgtgccctcacatagaggaaagacagtgagagagctctctggggtctcttacagagacactaatcccatccattaagtctctaccctcatgatctaatcacctcacaaaggtcccatctcctaatactatcacatangaggttaggatttcaacatatgaactttgaggggacacacatattcagcccatagcattctgcccctagctccccaattcatattcttcttgcatgcaaatacattcattccatcccacagctgcaaaaatctaactcattccaagacacactaagtctaannnnnnnnnnnnnnnnnnnnnnnnnnnnnnnnnnnnnnnnnnnnnnnnnnnnnnnnnnnnnnnnnnnnnnnnnnnnnnnnnnnnnnnnnnnnnnnnnnnnnnnnnnnnnnnnnnnnnnnnnnnnnnnnnnnnnnnnnnnnnnnnnnnnnnnnnnnnnnnnnnnnnnnnnnnnnnnnnnnnnccagcactttggaagctgaggcagttgattagaggtcaggagatcaaccccttctggctaacatgtgaaacctcgtctttactaaaaatacaaaaaaaattagctgggcatggtggtacttgcctgtgtcccagctactcggaggctgaggcagaagaatcgcttgaactgggaggcgaggtttgcagtgagccgagatcgtaccactgcactccagctggggcaacagagcgatactccatctcaaaaacaaaccaaacaaaaccagtgctgtcctttccatgataaaaagtggtccagtataatcagcccacatcagatcaccttgttgaatggtgccatattagggatttggtgttggtctctgctgctggcagaatgggcactcagcagtgattgtggcctggttggccttggtgagtgaaagtccatgttgctgagcccatgcagaacctctgtccctctaccaccatggctactttgttcatgggatcactggccaggccagtggctggggaaagagactgaatggtatacacagaaggggtcactctttttgcttgactattaaaatccacctctgccaaggtcattatttcatgagcattcacatgggacacaagtatctttataatctttgtacattcagagaggtctattcacatacctttttctccgacttccttgtctccattttccagtcatgatctttaactcttgaccagccaaagcactggccacagcctataaattagcatagacccttaacatctggctgtttctccttccaaacaaaatgaacaaccaggtgcactgtgcactgggattcctcttgagcgctgtcctttaggaatgttccagaaagactgtagtgctgtgattttccacttttgggtggtacccgcatatgcagaactgtttgtaggtcagatttgagttttcttttcctcaggcaactgctcctgtggaactccccatgaggctatatgtgcaggctgggagagaaaaggtaaaaaataatagcagaaacactatggacatttgggctacttcctcatgtaaattatacatgctttcatgtaaattacacatgcctgcgagagcccgatctcttatatataccatttccatttaattatggagtactgctgtataggctcatctttatgttttggtgggtcagataacatcctgttcattatgggcagttcagatcacatggcaactttgtggtccatggttaagtattcagtctctactaaggccaagtagcaggccatgagttgcttctcaaaaggggaatagttatctgtaaaggctggtagcgctttgctcccacattctaaggctctgtactatgatttatctaaagtgactgagtgctgggtgcaatggctcacgcctataatctcagcactttgggagtctgaggcgggtggatcacttgaggtcaggagtttgggaccagcatggccaacaaggtgaaaccccatctctactaaaaatacaaagattagccaagtgtggtggcaggcacctgtaatcccagctactctggaggctgaggcaggagattcgcctggacctgggaggctgaggtggcagtgagccaagattataccatttcactccagactgggtggcagagtgagactatctcaagaaaaaaaaaaaaggtgccctaccacagactttcaacagcatctcaatttctactccagtttcaagtaccatcagatctgctggatcatgtccaaatgttagagcagtttgcactgcaccgtggatctgttgcagagccttcttttgttctgggccccactcaaaactagaaagatttcaggtcactttgtgtattggttttctaggacagttgtaaaaaattaccatgaaccaggtagcttaaaacaatagaaacttaatctctcattgtcttagaggccatagtctgaaattaaggtgtttgcagggttgcttccttctggaggctttgagggaaaatctgttccatgcctctcttctagcttctggtgggttgtagcaatccttgttgttcatgggcttatagctgcattattccaatctcttctttaattgtcacatggccttctttcctgtgtgtgtgtgtgtctttctctctccttataaggataccagtcatttgatttagggtccattctaatccagtaaacctcgtcttaacttgattccatcttcaaaagctttatttacaagtaatgtcacattcataggtaccatatttttttggggggtgggggtggggggacacaaccttggtaaatgagcgagagtagcaaatgaagaatgagctgcctcaaatttaaagcctacgatgcatcatgccttttctggctaataggagggcagatgccgcagcttattcnnnnnnnnnnnnnnnnnnnnnnnnnnnnnnnnnnnnnnnnnnnnnnnnnnnnnnnnnnnnnnnnnnnnnnnnnnnnnnnnnnnnnnnnnnnnnnnnnnnnnnnnnnnnnnnnnnnnnnnnnnnnnnnnnnnnnnnnnnnnnnnnnnnnnnnnnnnnnnnnnnnnnnnnnnnnnnnnnnnnnnnnnnnnnnnctttatgagaagatgcttttgagcaaagactaaaagataagagaatgaaccatggagatgtgtctggacttgtctggaacattcaaggacagcaaggaaagagcatggccagagcagagcatgcagtgcggagagctgtaaaggatgaggtcagagtggaagccagtagggggaaggggcagttcaggtaggttctggtaaagtccttgcttttattcatagtgaagtgagaaccaatttcagccaatcacggggggcaataagtaaatgaaaaatatgactaaaaggctcattccggctgctgcatgaaaacagactccagagttcgtaatagaaataaggtatctgggtcaactacataacaattaccaaatctcagcaacacgaacagtaagaatttatttagctcatgtgtctgtgtgtcacttggagttctgtgatctaggctgggtcccctgaggccatctcaatggggacgagtgctcctcttccctgctccatctctcagcctccttgggaccagaaggctacaacagaaattttcttttcatgggaatcattggcttgtagatggcatcttaagccatgatcttgatttaacattaaagttgcttatcacacaaaatcgtggcccctgagtgtagagtttttcagcatgccatgtgaagatcttctgggcattgactcaccaaaatgatctaaatgtcaaggggaaaggggctcacagtttaagcgggtgataagacataactttatacttcatgacactggatgccaagaggtcatttttttaaaagctaattatttcgactgcattgctcacgttacatacaacagtttacattcggtgtcctgaacctatcacttcaagagctgagataccatatttttaacgtcggggataagacatctggagttttgaaaaacaaatttcagacaactccatccctggaagtggctattctctaaaactattttcttgtcttctgagagagagaaatatatggtttattaatgagcatatttcaaagccacatctaaatgttatgatagaactggaagaaaagttataaatacaaccaaagaataaatgagggatccattcaccattaccttccttgttgaaacatccagatttctacagtaggacagtcagggctggtgggcaccaagactatagaaagtcctctagaatctggaggtcatgcacttttcagatactcagaacaatctgacagggccatcctccatgtcccttcattaccaaagatataattacgacttaagattttcaaatttagggaagtataaactaggaatagcaatggaccagatagaaaaactcatctgtggctctcactctccaccaaacagggcatggacatatcggtgaaagatcatcaactgtatcatgttttttactggcacaacactattatggtttgcattttaaatgcagtttcaattttacgatgaagtagtagtgaatccttttttccttgataatagtggtctacaggcataccaaattcctggtaggtagctcatatagcgctaacattgagaaacacatgccaggaagctacaagcaaatccaattcattctctcacctaccacaagtcacgttatactaagtacctttaacagatagcctaggaagaagtacaggcagctttccacttgaaggtaaaaaaaaaatactcctaataattttcagtccacaacactcaactgtgccaataagccaagctagctataagaaagatgaaacaagtacggccataaaaacagtgacccttctacattaaaaaggaaaaaaaaatacaactccatttagcagctcaattaagatgacctctagtcatcacacttgttacaatgacagctcctccctctaacactagctagatttggctttctctggtggcctggaaatgacaggggaattattagctctttctctccaggcgtcagcatttcacaagcacttacggtggctttaacctcaaaagagttcgtgctctgcggggtaaactttcctctatggtatgtaattagcccattgatgcatctcccatgctgggctgatattctggagggcagcattagcaggtcaagttcaagtgctgaaggcaggtagcatagctgcataagattgcagagagctctctgtggggagaggggtaggcctgagggtctctgaataaatattgattccctgggagacaggacaacagtttaaaccatatggaatgtaaccaaagtatgcatgcatgcgtgcacgcacgcacacacacacacacacacacacacacacaaataggtgtgtgccggcctaactgttcctcctctgggacacaggtggttcctcttccaccattcataggaattctgaaccaggtatgggaagagctggtcatgggcagaagcaagaaggagcaaagagggagaccagaagctgtaatacacgggcagcccctgagggacacttggcaaaaagaaaattattgcttcaacatcattttccattaaacacaattacaagaaagaagtcacaaccaactatagctgaaatagcaactgattggagtaaagaacatgggtatgaggtcaagcagaactcagtgcaagcatggaagatagacgctggtactcattgtcagttgagttgtaccagaacgttcagattgtatttctcatataggtttgtgagaaacgtgaggattttgcactgccacagaacagagaatacaacttgagtttctcaagttttgaagctgagtttgattctgacactatctaatttcaacacttagaatccctcctcattcaggaatttggggaaaaagtgaaacatgaaacatgttttctctgtcccccaccccgcccccccattcttgctaggctgatgggtggttttcctgttaggagagtaggcatcgcccccaatggggaccatcaccacacatgtgcataaaacatggcaatgactgtggtacccagaaaacactcagaaatgaattttccctctgagacaccaccagcaacacccatgcataatgcatgagttcagccatcggtggaaataaaccaaaagattgtaaacgtgtgactgaaaagattgggaatgttgaaaactccaatcaagggggccagggtgtaatttcagagaaacaaaactcaaatgtgattgtaatttagcaaaataaatctgaatcaatttcactgtacccagtttaagaacagactctggaacacaaaggggagcgggtagcctggaacacaaagagggaagcccaaagagcccacagtcagcagggcctgtccagctccataacaccaaggacgtctattccgccatggtgcaggactgaaccatcaggccactcagaggccactgcatgtgaggaggaggaaccctgtggccgttctggaactcccacccctgcagcacccagagcagctctcccttgataactcccacatacaggtcttcactaaacatttcattttttaaaaaagagtgcctccatctgaaaacagctgtcctgagttaaatatctctaagactgtcttctatattactacttccctttgccctgacttcatagctactaagaaaccttccaataattcttcttcccctactaaagagaagaaggctcccaaacggcaagtattcatgttagtcacttgcattaaatatgtccaattgtagacataaaatgcagcataatcagtctcttctgagtttaattggctccaatacccaagtcacattccaagtcaagtcaccctcctgtccggctgaggcagccctctgataaatttgtccccccttcaagacactcagtgacccattggctatccttctatggatatcttcacattgcaacatgtaagtgtgaattaaatggttaacgttgaattcatcaactgatgagaacccttctgtcacagtaaaacccagtgaacaagcaagtggacagtttttacctgcacctgctgtggtcgggggaagtggtgactagcacaactcaagtagcaaaaggagagtaaaggccttgtaagtaaagggaaggatttctgaggatgcacgcaaaccaaaagttattatctccctccttagagccagagagaagcatgaggtccatccacctgaaacaaggggagttagctgtatgtcttcacaaatgtgtaattaaaacactgtgcggcaggtggttgcagaaggcatttgctggaggaaaaaaattcctccagcacctaagctttggtctgaaacattgtttcagtttcctatggctactgtaacaaattactacaaggtaataaacttgtgttgtgtacttaaacaacacaagtttattaccttgtgtgctgtgtacttaaacaacacaagtttattaccttacagtgctaggagtcagaagtccaaaatcagtctcactgacctaaagcccaggtgtaggcaagctggttccttccagaggatctgagggaagagtctgtttccttgcctttatctgcttctggaggctagctgcattccttggcgcagaaccttttcctcgcatcattccaacctcttgcgtccgtcatcacgtttcctgctactaactgggatcacctgatccctgctctatacggactccgtggttacattggacccacctggatgctcagcctaatagtcccatctcaatagccttaatcacactcgcaaagtgcctttcagtgtgtaaggtaacatattcataggctccagggatttagatgtggctatctttgggagccattattcagcccaccacaagtgtcacagccatgggtgggaacaggagtaaatcacacaactgaaatacagttgctaatccttaaaggctgagctctgagtggctgcattctcaaagacaagagaagtctttgtaatttagataccaactctgcctcaggaagaagatacacatgtgaagtgggctggcctgggttagtgtggcactcaggtcaccacaggacattcacatggaccaacacaattcccaggactggcacgatgtaaggagagaatactaatagggcccaacagacacctcccaatcccggccaacttgacattttaatgagtaattgacaccagattctcaaatataaagagcacctagcatgtttaggatctgtgtggctttattttacaatatataaactggaatgaaagctgtgttctacacggtgttcttaattatttcttcttcttgtttttatagagttctgggtagagaattcctttagatcttgtttggcaagtaacctgaccaaaggtcctaactgaagctggtggtcagcataccgaggtccaaggtggcactgagggtcaacgccacacatgacagtcctgttgactgtgcctcccgttccgaagtcaggcatgctgagaggccctcattagcctgaatatctctccagccacacctgtcacaagactgtaagtcaaaatctgtttcatatcaagcttggcttccaaatgaggtctctttgaatacagacttgtcctctttggccgcatggccatgaacaacttacttaactcttctgaacattagtttcatcacctataaaatatagataataatctatattttaaaatatatctatagtatatcttgcagattattatgattgtaatggataaagtagaattataaataatgttggagcatagcattcagtgaatagtagctattgttattgatatgtttttctgacctgtgaaaatgggacaatgatatacacaagattgttgtaagaactgagtgagataccttatgttaagcacctgacacagtatctgacacttagaagatgctcgtaaggattcattcccaatcccctctttccctgcatcctcacaattactctgttgaggttatcaaaaagggagaaccatcggctccaggaaactgctgtcaaaatcaacctttcacctgagacaaccctccaccccaccctatacctctcctgccggttcagaggcatagactcatttttcagattatctcaacgtgtacccctgcccttagcctgcccctaaggagacagggaaaactgtttccaatgggacaggacactaaggtgtgcaagaaggtatatactaggggcctcttattgaaagatcctatgagtgacagaaacacagcttcatcaagcttaacaagaaaaaggtggagtgagagatttgttgactcacataacagaaaaatccggtaagcatatctggtaaatatgactggatccaggtatttaaaagatgtcaagaattgtcttgctccatctctttgctttcctctgttctctttctctttgtcaagaagcaatccgcctcagggtggtccctgatcaccagcttagcacagagagagtctctttctcaatagttccaacaagatctgtaggccaaagttcactgaaccattttgaaacaggtaaccatccctagaccagtcacttagccaaaggaatgtagcatgctttagccaggccaaggaacatgcgcacccttggagctcagatatatatgttgaggggaagaggaagtagtatcagctcccgcttgaattccatggattgagagttgggggatgaggagtttgccaaaacaacagtgctaggattaaaagaagtagaagcagatgctggggaagcaaaatcttccagaagacctaagatacatggggcctgggtcagcctggcaacatgaggtctccaggccaatgtagcaggccctggaggtgggaggagagacacgtaatttctaagcagctcttcaggttacagttcttgctttgtctgcctgtcattaagtggattaccacaacccatcagcctttcaaaacagttcctacaacgtccatggttctttttataaagaacagcgtgctatgaagagcactttagaagagcttacattctcagaatgtgaatcaaggtctgggttaagccagacaaacagtcatttgaccttgctgctctgtcatggacaagcaggggtgaaaggaaggatatgagctgagacaggtgggcagaaggaggtcagagagctgataacccccgtgcttgagtcaccttgtttctcaaaggatgctctgaaaatggataataaaaacaagaaaagaatcttaaaaatcagtttgttgatcagtttattgtgtgggtccccaccgaacctgaccacattgaaaatggccatttgttcctgactcaaggcatcccatctcctaatcagcccttaatccctagtagctctccagttacttccatggttaccgagtccccttcttttgaacaaccaagggcctcaggaaagactaaataaattataaccattagttccttttatctactgctttatttcaaggacttctgacaggttcaagaagcataattttactcactcccaaggcatgccagcttgttctgttcaaattccacccaaccccttgctttagaagacttttcagtgattctgtttgcgtcgtctgtctccttacagaggagttatatcatcagtctgtaattcccaaggataagccaaggattctgctttggcatctgcagtgtaaaataaatgtggcttaaattaaaaatagagcaaagttctgacctgtttggccatggctctacatcgcctgcttttcaggatgaagtggttttgcaccaaattggcaagatagccaaaaatatgcttaaccctggccacagatgaaaatcattcaaggaagttttctaaaataaccaggcctgggcttcaccccaaaccaattaaacacacatctttggattttgggcctaagttccagaattttctttcaagtgtgcagaggagttgagaactactaggagaagnnnnnnnnnnnnnnnnnnnnnnnnnnnnnnnnnnnnnnnnnnnnnnnnnnnnnnnnnnnnnnnnnnnnnnnnnnnnnnnnnnnnnnnnnnnnnnnnnnnnnnnnnnnnnnnnnnnnnnnnnnnnnnnnnnnnnnnnnnnnnnnnnnnnnnnnnnnnnnnnnnnnnnnnnnnnnnnnnnnnnnnnnnnnnnnnnnnnnnnnnnnnnnnatactaacatccatcctacttcccatcctatattttcttacactgctctatccccccaaccccactgtggtgctatcacttggtaatataccatataacttactttattagtctgttttcacactgctataaagaactactggagactgggtaatttatgaagaaaagaggtttagttagctcatggttctgcaggcttaacaggaagcatggctggggggctgcaggaaactgacaatcacggtggaaggcgaaggcaaagcaagtgtgtcttgccatggccgcaggaatggcagcgggtggggtgggatgggatgagacccctgccccttcacacttttaaattatcagatttcctgagaactcactgtcatgaaaccagcatggggaaaactgcccccatgattcagtcacctcccaccaggtccttcccttgacatatggggattataattcgagatgaaatttgggtgggaacacagagcaaaaccatatcacttagctacatcattgttaaagtctgtcatcttctgctagaatgtaatctttatgtgggcaggaacagtgcctggcatattgtaggcacttattaaatatacctcttgacctttatttagtcaataaatattggtgaacactgaggttctctctgactaaagcagggtgtggaaacacattttcatttgcccaacaaagaccttcctgggccaccctaatagtattttgtcaggatgttcccaacgcatctttcctggtctgtctcaccagcacagggcaatcatcttcaaaatggaaagccttttcttcacgcctgtaatcccagcactttgggaggccaaggtgggcagatcaccaaaggtcaggagttcaagacccgcctggccaatatggtgaaaccccatctctactaaaaatacaaaaattagccaggtgtggtggtacatgcctgtagtcccagctacttgggaggctgaggcagaagaaggttgcagggaggtggaggttgcaggcagccgagatcttgccactgtactctggcctgtgcaacacagagagactctgtctcaaaaacaaaacaaaacaaagccttttctgtagcaaggtaatatggtttggctctgtccccacccaaatcttaacacgaattgtatctcccacaattcccatgtgttgttggagggactcatggggaggtaattgaatcacagggaccgggctttcccatgctattcttgtggtagagaataagtcttatgaaatctgatgggtttatcaggggtttctgcttttgcttctttcttattttctcttgctgctgccatgtaagaagtgcctcgtgcctcccgccatgattctgaggtatccccagccatgtggaactgtaagtccaattaaacctcttttttcttgccagtctcgggtatgtctttatcagcagcatggaaatggactaatacacaagggctttcagtaacaaaagacaaaatgttattgtgcatttttacttcatttatttatctcacataagctaagagctgatttatactcattggtggttttgtccaactgaaaagtgaaatactaacttgcaaacaaacatgatcaaaaaggcttttcagcttgaaaattgtgtcctggagttcacttttgtttccccctctaagcataatcttttaactggttcaatagacttttgggcaaaattctagcttggcccatttttgctgttatacaactttgaataatgttcctatggcttatgctcttcaactgtgggccaaatttgtcaatttatattggaaagtatattagttcattctcacactgctataaagaatacctgagacttggtaatttacaaagaaaagaggtttaatttgctcctggttccgcaggctgtacaggagatatgatggattctgaggagacctcaggaaactttaaatcgtggtggaaggtgaaggggaagcgggcatttctcacatggcaagagtaggagggagaaagagaagggggaggtgtcgcacgcttttaaacaaccagatctcatgagaactctgtcatgagaacagcaccaaagggggaaatctgcctccctgatccaatcacctcccagtaggttctgcctccaacattgaggattataatacaattcaacatgagatttgggtggggacacagtattatgttgtactttctctagaaaaattctagagtcttagcagagtaggtaagagaagattccctctgtgctctaaagatgaaggcaaagctttactaacctcatgcccacttctggcaagtttcataacagagggtgtcctgtagcggggaggggtgtactgacaatcatggagttccagatacttcacttttgtggttgcttatgtgcagttgacctccttgtgtattcccctgcctggccacccgaatgacatcctatgctgtcatgggagtcttgcttactatacacatctaacattctaaattgtagtatttacactactattgccatctctacttttctgcgctagtgaactacatttgagtcatggacccatttttattatggtcagtactaacaaccaaaatgcatatttgacaaatgtaaacaatgatgtcgaaataaggtgaaagtatattgatcaagatgagctctgccctgttaactgaaagattagctgggacaaactgaccaacaccatcctgataatacatggacaaattttaaaaatagaaggactggctgggcaaggtaatgccagcactttgcagggtcaggcaaagaggattgcttgagaccaggagttcaagaccagcctgggtaacatagcgagacccccatctctaaaaaaaaaaaaaaaaaaattaaggttgctgggcgtgatggtgtgtacctgtagtcccagctacttgggaggctgaggtgggaggatcgcttgagcccaggaggtcggggcttcagtgagctctgatcatttcactgcactgcagcctgggtgacagagtgagacttccttctcctaaaatacatataaaatagaggtaactgtgaatcacagttaatactacatttcaaatgaatgacatgactagatgaaatagttctgttgctttatatctgagactgtcaaattgcctgtagacccttgacagttaaccaagcctgataaatactgctccagccttggggtactggaagtgtagtccagggaccagcagatcagcatcacctgggagctggctacaaatgcataccctccagtcccacccaggggttccgaatctgtattttaacaggatcctcggggcattcaagactcaaagattgagaagtgctgctctagacatccctttctgattatgatggataacaggagggctgacttactctcttaataaagaaaagcagcaggtctttaaggatggcagtaaacaccaacttaattggcaaatcctaattgaatcaataatcatctcttcatttctagctggtgcagactatggggtggggccgggggaccgaagggggttcctggtcaagatttcaccaggaaaagggtgccctttgaagacccatagccaaggataactgagccaggattgagccaaattctgatgccgtcctcatctttggatctggtgttaatgaaaaggagacaattgaaagtaatgtggtagatgacgttgcatggtcacgggggcttgaagggagcagtttttttttttcttcttttgttcaggcagcagctgtggctccctaaaatgatatcccaaatgtgttgcatgccagggatttagaacttgatgattcacaggttttgtgagttggtgcttttatagccagacagtggtggcggcaatgcatgtagttacagcctgagggttcagaaccagaatatacacgatagcagcatcttcatcactttgtagctactttttagccgatatgctccttattgtcccagcaaacatgacaacacctctacagtctcagcttgctcatgctcttgctttttcctaccagtcctacctagcttttgaaatctttatagcctatcccaactactggttcttctaggaagcctttgattttctgtaacagatatctctctctcctgaaaagtctgtctaatttagtggctctcaaactggccgcacattttaaaatcacctgggaagcttaaaaaaaaaaaatttaggccacagcccaggccagttaagtcagtctctgagtgtggggcctaggcatgagtagtttctaaagtgctccaggtgagtccaatgtacaactgatgcaggatgttttgcttcttagttcagctaaatctggggtcttgtctcacgaccagaaaaattaggcacgcagacacattgaagggtgaggagggcagaatttattaagggaaaagaacgctgtcagcaaagagaggagttctccaagcagattgccccctcacaattgaataccagggctcccacttgtgagctgaagaggccagcctcctcccttgcataaggtacaaattcctggtggctccacaccatccttccagtgtgcatgtgggcccttagtctgagccactccacattgatttatttcccttactgcgcatgtgttaagggatggagtttttcaccatgggcatgtttaggcaagccccctgtgcacaatgacctgggcaggtgggaggttctccagggaccctcccctatcttcctaggcatttggctatcttctgcctctatcacaaccagggtggtgaaccagtaccataatccttttccttttgagcttccttgtaaccctaatttgctatgatttacataatttttacttgatccctatacccatactgaactcccagaagtcaggagtagatctttctcccctgagtcccctgcagcctctagcacattgctcagtgcacttgtacactgcttctccttcctatcattcaccccactgtgggaccctcatcaggagctgtgtggttcttgctgctcccatcacctccatttctggattcagggattaggggtaggcaaagttagacgtgggtatgctggagagcctaatgcttctaggaaatttattaagcaaagtattttactttgctagaaaaagtgtgcttaatggtatggatagctacagacttctttttgtctgtccaggaactttttgttagaattatctactgctacataacaaactacccccaaatttagtggcttaagacaatagtaaacatttatttcatgtagtttctgtggctcagggatctaggggctgcttaactgggtgactctggctcagggtctctcacaaagatgcagttacaagatcaaatagggctatagtcatctgaaggccagactgggtggaggactcacttccaaggtgtctcactcacatggctgacaagttgctgctagctgttggcgaaaggcctcaatttcctgccacatgaactccacgtgactacttgaatggtttctcccagagtgaagatccaagaaagcaaggcggaagctgaaatgtgttttataattatgaaccattatctccatgtatcctattagctacacaggttaacgcgggagggagcaacacaaaagacttgatgtttgctcactgcaggagccacggatgaaagggttctgcttgatcctccagaggatgggcatgtgctgtaggctggcaggccgagtaactgcctctgggtgaatatgactggtgcagaggtgggcaagtgacccaagtggccaatcactgtagtcctaggattttgccagggcaatagggagaaagctaccccatggtctcgtagtttggggattattaactctaagaataatgaaagcttggagctgctcatgcacatctttgccattgcattgaaccttttgagaatgaagccaaaatggagaacagagagaggcacagcatctgatgacctggtttgggtctataaagacccaattcagctgtaccaaagctaacttcctaaacttgtaacttatgcaagcaaagaatttcttcagttagactgattttgatttctgcctcttagtatcaaatgagtcttggctaacccaggcctggaggtctggggcctccttgctcactctaggccactgtcctctcttctgtgtgtggccattcttcagtctctggtctgaccagtgtaaactctgtaaacctagggtacatctacctagttccctgccccaatgctggggcattaagtgttcttagtgcatattgacagaattgtggtaaattttcttgcagcctcgtatagtggggaaaaaattgtggtctttggagctatacagtcctgggtataaaacctcctctgtcattaatcaactgtgatcttaggccaagtgcttaatgtttctcccaggttgtgtacataaagaagggcttgtaatctgatgttcccagggtggttgtgaggatgaaatgagatcatatgtggaaaagtgaggcccatatcaaaggctgaactaaaatttttttctcttaccatttttcatttccccttctagagatagtagctgaatgctacctagtcaggacttaattcaattctgcttaatcagcatattctgaacacttgccatctgctagatgactagataatggggtgtcaggaagggtgacttgataattttgcttaactgagcactgcctgtagaccaagcatgggattgatgagtttcacagtatgactctgtattgcttttggccacattatgaagtagggggcatttgaatcttgttccttacattaggttcttgctgaggtgctcttctcccactgaccagttcccagtggggagtggggcatgcaggaggatgcagctagacagagacactggccactgtagtgttgccttgagatagtccagtccctcctttacctatagccnnnnnnnnnnnnnnnnnnnnnnnnnnnnnnnnnnnnnnnnnnnnnnnnnnnnnnnnnnnnnnnnnnnnnnnnnnnnnnnnnnnnnnnnnnnnnnnnnnnnnnnnnnnnnnnnnnnnnnnnnnnnnnnnnnnnnnnnnnnnnnnnnnnnnnnnnnnnnnnnnnnnnnnnnnnnnnnnnnnnnnnnnnnnnnnnnnnnnnnnnnnnnnngccagactgaagaaaagtatgatggatacagagcttaaaaaaaccaacaaattcccttcattccagcagtatggtaagagttgtgattaaggaatgcctagaatgcaatgagagggaaacctaacacagatgtgagggtcaggaaaggctgtacacaagttatcaactgagccgaacactgaagaaatgaataccatccccccaaaaattgggaaagtgcattctaaagggaagcatttatacaatattaagggatgtcctttgatcgggaagagcttccaagcattccaatatggctgcagtatgaagaatttaaaatgagagatgggcgaagctaaaggggcggaccaaatcaggaagggttttgcaggcctattacagagctcagattttaggctgaaggtaatgtggtgccactggaggtctgaagcatcgtgatgaatagagccacggaatgagggatggattggaagatggagaaaatggaaatgagaggccagttaaaaatgttcattacaggccaggcgcggtggctcacgcctgtaatcccagcactttgggaggccgaggcgggcggatcccgaggtctggagatcgagaccatcctggctatcacggtgaaaccccgtctctactaaaaatacaaaaaattagccgggcatggtggtgggcacctgtagtcccagctactggggaagctggggcaggagaatggcgtgaacccaggaggcggagcttgcagagagccgagatcgcaccactgcagtccagcctgggcaacagagcgagactccgtctcaaaaaacaaaaaaaaatgttcattacagcaaaactgtaatcaaggaaatcgagggtctccaagacaggagtgaggagggtagagcagagggccaggggacactcagagggacacggcacatggagactcagtggaagggggactgggcaaggctcaagttctgccttaaatgactggtaagtgatggaaaaagagaaacctcagaggaaaagcacatctggggcaagatcagtgagtctcattttagtattagttgtaagctgggtttcatcagcaagtgaatttgtccatctggggctgggaagagaagcatctacaggctggaggtagatgcaactgcccatggaaggcatgtttgtgggatggaaacatggtcaaggccagaatcctctttctgggaatatatgggttgacagtgatgaaatgtctaaagcctaataaggaacttaaagcccagcaaacatttcaatgtgccagtgctggctagcatttattaaacatttttcaggtgccaggcagtgcatggctgtgcatgagcaatcctcatttaatcctcaaaaaaaggttgggggaggcttcctccattattatccccatttttcaggtaagtaaaactgagatttatagaacttaacaaactagaccaaagtgatgcattaactggcctaaagtgaaggagccaggttttaaacttcattttatcactcagcagagtacaaaatcttaactaatgtgtggtggttcaataccacatagtacttgcaaaaaacaatttttctttttctctgttctttgccaagaaaagtggtataattttaaaaatcaaactttaaaataacaaacttaatgatttgagggctaggagaaacaagaaaaaagacatggttcactaagatcacatcagaaactgccttggccacagcctgcctgtgttgtggggtgaggggaaaggacaacgtggagaacagatgtcagtcagtacaattcttcctttctagatgtgacaagcgcaagatgatattttagtctacttcatgccacatgggaaagactcatgcagaatgggtggtccagggaccaagatgccaaagaacaataaactttaaaggcagggtggaactttgccaaaagggcttattttcttcagcgaatcaccaaaaaagaaagtgccttttcaattcctcgacatcagacaagatggttctcacatgttttttccttttcttttttttttttttttcctggaaatctttatctcaacagggaggtctgggcttgggcctggttttgttttccacggcttgcggtgttcagacacaggctcagcaggagcctgacctcatctcagaaagggggtccttgagggcaaccgtgctgatgcagccttccacagaatcccacaaaggatttgtgttttcctccttcatttcacatggctgactggagccaatcagctcatggagccaatcagctcaggaattgttttttttattttttttaaggtgagtgtttttcttctcttcactaaacacaagactgaccaatatttctgtttgtgtgggcttattttctcattctctgtgtatatgtatgtctcattttctctctcactctcccacacacatacacacgaacacacactccttcctttctagcacaatcttattgccttgatgaagagtgcagtgaagctgaaaacaaatgcaggaagtgacagagacacaagcatgtgtccaattagcaataagaaaattataagcactggtggtgaccactcatgttgaacaaccagctcagcaaagagccttgctccatgtctcgctgatctaattagaaccactcatgccacgagtgacctgccttctgcgttttccacatgctgcagtgctcatgctctctcaggcgttaatgagggacatggagccatcgatagttttcattaagccacagactcgcaagcttgtcagatgtaccatgttttatcaattctaccacaagcttctctgcccacattttaacatctttaaaatcacaatatgcctcagaatcaaggcaatcatggtatggttgtcattgcgtctgagtggcaaacttggtcaccgctgttcatattgtcatagtttcaactgagttaaatatgtggttgcgaaatgggtgttggggttcagtgatgtttaaaagttcctcaaaatgttctcctacatgttggcattcaaacaatgagctattgtgtatgcagaaagacgaacagggctgggatgtaaattttacatttgtgaggcaaattgttgttattataggaacaaatgcaatttcatactttctcacaaagcaacaacaaatggtttcataacacctaataaaacaaaaaatccacaaaaaatgaagcagttacatttgctccacatcgagcaatgcaacggaaagtaagagtaatagccaggtctctcacaagagaggaaagaaatttccaagcagtaaggggccagtattacagactcaagagtcatgcaactactgttaagacattatgtcagaatttaaaataactttttaatcttagaggttcataaagtagtagtacatctagatagtttcttaggtttgacaaaatgtagtatgaccacaactttcacacccaggaaaacacataactcccttcaaagtacttgagaattttaaaagggtggctctcatttcatgagacagtagccacttgctaactttgagagagagctagcttccgagcaccaaaaggcatgaccaccctgtagcagatgtggttggttgccatcccccaccctgtttttcttgctaacagaactttgaattgattcaaggcttaggggtcttgtgcttcagaggagacttggcctttctcagaggatcttcatgaattgatcccatcatggtgatctcaatctcttctctttcccactggttttttagaagtgggcctgtaacctagttctgagcaataagatgagaagggatgagagtgagagggtggggaagatttctgggatctttaaaaaaaagaaaaaaagatgcatgagaagaaacctcttttctacagactctgggcttggtgatgcctggagctacgttagccaacttgaaactatgagggagcctacctgaagacaagtcacacactaaagatggcagagaaggaaaagaggggggaactgggtccttgatgacatcactgagccactttttaaccaagcctaaagccttagcttctcgttatgggagacactaagcatctttattgttcagcccattgttagtaattgagttttgtgttgcttgcacccaaagacccgtaattgatacagtcccatgtccccactaatgccatgaagccaccttctcatctagactttgtgaaacttccacttgggatgaatgaatagaatatggacattaaaataaagaatatgaaagcatggtcaactctcaactgagctggacagtcaacatctactagagtttgttcaactctatggacctcacatttcttgagggatgagggagtcacatattaaaaaaaacattgacaaaatacagctggaacctgtccaaaagaacaatctggtattcgtaattttattgaatacatttgttgaataaattgccagaatgataaagtaacgtcaaaatcatgtgagaaagagagggttgaaaatattttatctcatgggaaaaagaacttttgtttgggataggggagcagagtctcttccaggaattgaaggagcagcctgtacaagagggatgacattgtttctgaatgactccaacagataaaactagaatacagtcttgtattacagtaatggcaaaaaccacaattacttttacaccaacctagtaattcatacattctatcaacaaagttttactgacctaacagtcagaacctgccctcatgaaaccaataatctggtggggcagatggaagacaagcaaacaagcaaatgaattcttacaaactataatgtgtacaggaaataaaataaggtgctgtaagagagaagagggaaggaattctaaagtaaatcacacaataagaaaggacatttctaggctgggcgcggtggctcacgcctgtaatcccagcactttgggaggccaaggtgggcagatcacctgagctcaggagtttgagaccagcctggccaacatggtgaaaccccatctctactaaaaatacaaaaattagccaggcgtggtggcgggcacctgtaatcctagttactcaggaggctgaggcaggagaattgcttgaacccaggaggcggaggttgcagtgagccaaaatcgcaccactgcactccagcctgggtgacaagagtgagactccgtctcaaaaaaaaaaaagaaaaaagaaaagaaaaagaaatgacatttctgagacagttatatttcaaccgagacctaaacaatgaaaagatgctattcagagagcagggaggaggacatttcaggggacgtaacagcatgtaaaaaggccctgaggtagaaagaacctggccttagaatcaagacaattatggtatggttgtcattgcctctgagcggcaaatgtggtcactgctgtttatattgccatcctttcaactcagttaagtatgtgtttgcaacaacaggtattgaggttcaatgaaatttataagatcctaaaaatattgttctatatactggcaatcaaacaatgaactatcgtgtatgcggaaagacaccctaaaacaggactggggtggaaatttgacatttgacatttgggccacactaaagcagccagagtgtgtggctgaatgaggacatggaggaaaagaaagaacaggaaaatggtgagggggcccacatagtagagagctttaagctatctaaaagtttgaattttattttaaatacaaaggaaagccatgccattaaaagtctctaaaaagtcgaataatataattcaaattaaatttttaaaagatcactggctgtggtctgaaaattagttctttgggggatgtcaccactgttccggaaactgcagtggtggcagtagagatggagaaaaatggacactttcgtgacatattttttagttataatataggacttgccgacaggggcagggaggatgagtgaaagcaagaaatcaagggtgattccctaatctctggttgaaacaaattgggagaaggtggtaccatttatcaagataaagaagaaggctgaatgaaaaggtctgggagtatggagaatggagtattccattttagatatgttaatttaagatgcttgtgaaatagccaaatggaggagtccagatggcagttggatatatgagtctagagctcagaagagtgtactgaaaaggacctacaaacttgggatccattaacttatggatgctatttaaacacatggattttaaaaatgggtgaattcatataaggcaagagtatgtaagaaaaagatggtttaacaccaagctctgtggaaccgagagactgtgtagaggtgggatgttagccaaagacagttaaaaaaaaagggaagaaaaagaagaaagaaagaaagaacagcaaagagaaaaaacagaagtgcatgctatcatggaagtcaaccagatgtttcaaggagtggtctgtcagctacagcaaaatcatttgaaagataagtaaattgatgacagagtaaagtaacattggacatataaactagaggttgctggtagccttgacaagagctgtttcaatatagtggtacagacaagactagaggggagaaggctgaccagtgattgagtggcaagaaagtagagaaggcttatggagacaactctttcatgacattggctctgaggctcaggagatgcgaggagaaaataacaataacaacaagcagaaaagttgccacttattttctactatcagccaccaaattgtctccaatccttacaacaactctaggtagtagatattatcatctctggtttacagaaagtcagtgaagttaagaaccatgcctaaaattacgcagtgtattcattttctctgctgtgtaacaaattacacaaatttagccgcttaaaacaacacacatatatgattacacagtttctgtgggtcaaaaggccagaaatggcttaagtggtgtcctctgcaaagctgtaatcaaggtgtcagtcagagatggttttcatctggaggcttgcctggggaagggactatttccaagctctctcaggctgatggtggaatttattccctgtggctatagaagttatgacagcttgcttctttaaagccaccactggagataacaagacaatacagcagggacatggagacttatataatgtaacataattatgggaatggcatcatctttgccacgtaatacaatgtaatcacaaggtaatggattagcaatccattacctttgccatattctatgggttagaagtaagtcatgggacttaatctaaactcaaaggaaaaggattatataatacaaaggcatgaacaccaggggcaaaagccctggggtcacctttgtgtctgccccactcaactcacacttggtaagtggctcttgtggaattttattctattttatttcaatatgcattccctttcagtttgacaatgtagcctcacaaatacagaaacacatttctaaaaatgtagagccttctgaaaattgaatatactggttacaaaggtactaaattctctgtcactaggatgtccaagcttaagttggacaatcatttgatgtggatgttgccaaaaggccttacactttaatgagggtactgtggggcaagacaggggtggaggaaggtgttgagttgggtgacttccaaggtgcttcttaaccttaaagttctgatttttttcaggcgctctatagaatcacagaatttaagattggaaggagtctttgagatgaagcccagcgcctatacttaggaaaactgaggtctagagaagcaaaaacttatttcaggctcagtgcaagccactggtggcagaaaattaatagagataattcctgtcttcaagaaggttataatctaatcgggagaaagcagtaaaagtgtaacataacatataataaacaaattctatgatagaattatgtttaaggcaccccagatattcagaagagaggaaactgaggaggggggacaagctgtgggggcagatgattgggtcagattcatagcagtagacgtttgaggtgcctaaggtatagccaggtgatgttaactagtacggggcttctccaaccttaatgtgcacacaaatccacctggaaatcttgttaaaatgcagctttcaacttagcagctctggggcagggcctgagattctgcttttctaacaagcttccaggtggtacaggggttctttagcctcagaccatagtctgaatagcaaaaatctactaaggaagttagtaaacaggtctcaaatatctgcccttcgaccactcctttccaacctcattctgccatctgctctctgaactggagagatgagaagccagtgccaagtgaggaggagagacacccaggggatttccagacaaaagcacctttaccagaggccacgtgggacagccaggttacctgggaagggaagatgcccttgagtgacgcaaagaattcatccactgtttccgaccttcggctcacattcactaacctgtcttcttaagggaatacaaaaatgaatgacttcgtaatgcaaatgggtatgtctgattaactgagaactgcacctttgatgtattagacagtttcaatatagagggtgaaaactaaaaaaaaggtaggtgggggtaggacctaaaaagagaatcaggactcagtggagaagaggccggagctagaagagtgtcctcagatgtctttaacacctagaaccactctatgtaagaataaattatgaacatgctgcatctacaattctatgagactattttatccatcaaggcactctaggtgcaaggcccatgtcatgtgagttcttcagggacctatgaaaatgtctgaggccacaatataaaaccactggctcccaaatgtgaaaataaactaggaaaatagaaattaataaatgtttattgtcaaaatatattattttaacctcattagttgttcagtttagtttttatacaaatttcattacatctgaaaaccattttaacgttagatttgctcaccttgccaaaactccagagcaagttgtaatgattgccaagaaataccaacaggtggccaatgaagtaaatttccagtagccagtcatttctaaagaatacagaatttttgtctgattttacatctaagtatatatctttttgatgcagtctttatatgcgtattaatacatatataaggtgataatacatatataaggtgatgtgagttctgaagcctggcactggctttagaatgtggcagttctttgtgaaaaactttaaactgaaaaaaggggatgactgtccaggtgacagtaactgttcaggtgaaaattatggatttttttagggttttactcaaagtagtctaaggataaaagaaactaatgaattcattcattcagcaatactgattgagcacctactatgtgccaggcactattctgggaaaaggaataaacagtaaaacagttaaagtagcagacaccagtgtaatgaaagagtaaattaaaagacagctcaccaagccatactcacccactggcctgaggttgggccaggtaagcctgactgaagggaagtggaccacatgggctcctgggagctgcccttgcttcctcagagaatgaagaaaattcacatggatgcaaggccgactttgtgccaaactctgtgcccagggctgtgtcattatcttttcttttcttttttttctttttttttttttgagatggagtctcactctgnnnnnnnnnnnnnnnnnnnnnnnnnnnnnnnnnnnnnnnnnnnnnnnnnnnnnnnnnnnnnnnnnnnnnnnnnnnnnnnnnnnnnnnnnnnnnnnnnnnnnnnnnnnnnnnnnnnnnnnnnnnnnnnnnnnnnnnnnnnnnnnnnnnnnnnnnnnnnnnnnnnnnnnnnnnnnnnnnnnnnnnnnnnnnnnnnnnnnnnnnnnnnnnaacactaaagtctaaagtccaaagtctcatctaaatattgtttaaatcagatataggtgaaactcaaagtacaattcatcctgaggcaaaattcctctccagcttcaaacctttgaaaccagaccaattatgtgcttcccaaatacaatgataggaccaatgtaggctattccattctgaaagggagaaataggacagaacaaagtggtcataggtcctatgtaacctgacagggaaaacaacatgaaaccttagagtttgagaataatcctctctggccccatgttctaccctctggacccatagggtggtggtcctgcctccatggctatccctcgttggggttgggagggcgatcacaggcccctggctctccagggcttcggtctcaagatataaaggggtctattatttttattgttaaagttaatactattcaagtcatcattatggaaagcgagtgacaaagaaggcatgagtgaagtttgactttggcctgagggttgtagaaaaatgaagcatgttccccctgtttccacccattaggattaagtagttgaggcctgtcctccgcaatgcactggtctgaaattttactgcttaggatcatggaactggctctttctttggttctgttccacctcaaataagctggggagaggtgtgtggctgtcattgggtgtggcaaagccaaagaaggagctaattcatgattctaagcatgtgagggcttggcttgttatgagactattttagcctttgcagcagcagtagttctaaatattccaaatacctagaaattggaaaataatgacaaaaataactcagtgtgagtttttgtaggaaggtatgagcaaggcatttataaagtatctttaaattgtaatgatgtccaggacaggttaatgtttgaaatgccttgacccccagctaaaagtggtagagaaaattcttttgtcaaacggtccacttctaatcctcatcattgacagaggctggaacaccttttttcctttcttttttttttttgcactgttttatttatttctctagtaatgtctccaatgacacttttcaggtttactttttttcccctgatattctcagcttgtgagtgataaatagtgcttaagaacaattttgatacccacatacttccagctgagagacttaattgaggggtttctttgcctgtgtgttttgaagcgttgcctatgccgtggtgctggttatgctgaagaatagctccttctcacatttcaattctctgaactgggttggaattcagtctggctggcttgctaggcagccctttatactgggctgaggtcttgaggctgcttcaagcccatggactaaaaaaaccaccaacaacaaaaatcccccccccaaaaaaacaagtaatgtctgcctggccctggctgccgggctcttgagaactgcagctgtgtggccatcctgccatgagtgataggccatggctactgaactgtgcaaagtctcacctccaaaactgcacacacaaccattttttttggtgtgtgctgttgattctgctcactgaggcatttccttggagctcaagatgtgcattttttaaaaaggggattgcctattccaagggctgcttgcagctttgcaaagaaaacctgctgagtcaccaggggtggccaaatactgtggtcagagctgacatttgatggtggtttgatggaggaggccacctgaaagtcaattgttaaggcctttgagaaggagtgagtgggttcttcctaaagaggagtaggtaagtagttgccttctgggactctatctttcaacccatctttatcacttccctatttaggttatcaagaaaataaatgggctaatgaatcagagagatttaacctgaatttgccatttatactgtttgaccttggacaagttacttaacctctctgagtctgctttttttcttcttttttgaaaaatggaaatgaaataatacttaactcacgaggttgttggagaattagatgagctcactgcatggcacagtgctcaataaatgcctcattttagttgtcttctttgaaaatgcaagtgtcacattaaggattcccctagtacaatgagtactccctgtcttagtccgtatgggttgctataacaaagtactatagactgggtgacttacacacaactgaaatttttatcacacagttctggaggccagaaatctgagactggggcaccagcatggtcaggttctggtgagggtccctttccaggttgcagactgctgacttcttgctgtgtcctcacatggtggaaggagcaagaggtctctttggggccttttttctataagggcactaatcccattcatgagagctccatcttcatgacctaatcaccttttaaaggcccaacctcctaataccatcaacctggaggttaggatttcaacatgtacattttagggagacatgtaacgctcttttgtcatctaattatcattagataatagatgtcaatccattaaaacaaggattgacaggaattgggtagaattcctaattaggtagaattagggtccaaggagagaaacaggatcttgcagggtaataataccaaactggtaatggtaccaaaacactgattttctcatcttacacctttccctggggtcaggccctttagaggaaactgctatatatatttaaagaaatatatatatttaagagttctaaggtacatactttttttcagtttaaaatctctgaatttatggcattcataattaaaatgtttaaatggtatgtgaaataatgcatcttataactgatagcatcttagttttcataaatatgtaatacttttaataaacaacaatagtttcaggaatctggggccttcattgggattccttagacctgcactgtctagccgctggccacacatgtgttatgagcacttgaaatgtggctacttcaaattgtgatgtgctgcagtgcaatatgctcaccagcttctgaagactttagtatgggaagaataatgttaatctatctcattaatacttctttcattgattacatgttgaaataataatattttggatatattggattaaataaactatattattagaatttattttacgtggcttttaaaaaatttttacttttttagggtggcttctattaatgcttcatgtgcagctcacattacgtttctcttgaatggtgcagcctttgaacacagatgccaaagattatctgcagtcactgtgtagaaactggaaggactcccaccccaaatttggtttagatgtcaaggctgatatgctgcacacatatcaatagtgtaaaaaaaggttagtttcttatataatgaggctttctggagagagcaggatagatcccaagcaggtctcaaatggcttgagagcagggaaagaagactagcttgggtttttatggtgattagggaatggggccagggtgagagttctgacatctagcaggtgcttgcattgcatgaaactccaagggagcacctgggctttcttatcagatttctcagaagggggacagaaggggaagagggagggggaggcttaaaagctgtcagttttgagggctgataataagtaagtcttatatattatctaaccctgtgccttcattttacccatgaggactcagaaacagagaggggatgtgacttgcccaaggtcacacagctagctagtgcagtgctggtgctggaatccaggcctctggagaccagagatttaccctctcttccatagcaccgcatggaaagccactgggaagacaagaagattgtttctccaggggctgcttgccgtattttgtgaatctgttgagaaggagaaagtgctgaaggatgatggtgaggcatagagcagccaccagggtctctctcttgctaggcagtcttgggtcaacttcgctgatattgctgacaaggtggctcgagaaagtgacttgaaacttaaatactaactcaacataaaatgaaaaggaagttaagagtctgaaaaaaaacacaatccaaaaacaaaaacaaacttgtgagaacagagtgggcattgtgcactcacttcttttgacattaaagtggctttgactcgagccaggaaagctcacacacctacatcttgcttcaggattaaaaacttccaagagaggttattagtccagggacagaagtccctcattgcaggagcagagcttaaatgctttacaaagaaaaggaaataaactcattggaatttgttttgatccttccaggagagttgttttgagagtacagtgtgcattttggaagccctgacttgctaaaaacacacttgggaaggaattggttttaaaacctgaatctttgcctggctcttggcttctctcagtgttggtagttagcgttttctgttgattgtaccacacaaaaataaatctggatttgttttgtttttctgatttttttctaccctggaagtagagcagatttctcagtgaaaatgattttggataaagtctcaaataattaattgctggttccagctgacagtcgctggaacactggaacacactctctctgctgccttccaggaagaacaaggatggaaagagttcactgagaaccagatagagctttctttaccatggccaaccgagagaatttcataaatacctgcacgtaggttcacaattgtctggtgaatggaacacaacgggcttagaaaagtaaaagccatggacaatacccaattatatagatttagttttgaactgtcttttatttggtactgtcgtttgaatctgggggattttatggttaaaataataccaacatatatcaagtacagattccatgccaagcctgtgtaagggagtttcacattggtgatattatctctattgactctcttacttactatctgaggtgggggcgggggttgtgtttggaggggagcactcactactacctagctgtgtcagttttagcattgctgtaaaggattacccgaggctgggtaatttatgaagaaaagaggtttaattggctcatagttctgcaggctgtacagggagcatggtgctgccgtctgcttctggggagaacctcaggaagcttccactcatgtcagaaggagaaaggagcaggcacatcacctggcaagaccaggagcaagaggttggggggagagtgcaacactctatttaatttaattaattaattaatttttattttttgagacggagtctcgctctgtcgcccaggctggagtgcagtggtgcgatctcggctcactgcaagctctgcctcccggcttcatgccattctcctgcctcagcctccggagtagctgggactacaggcgcccgctaccacgccccgctaattttttgtatttttagtagagacggggtttcaccatgttagccaggatggtcttgatcttctgacctcgtgatctacccgcctcagcctcccaaagtgccgggattacaggcgtgagccactgcacccggtcaccacactctttaatcaactagaacttgcttgaacccagagcaagaactcactcgttaccttggggacggtgctaacctattcctgagggatccgccacatgatccaatgcctctcactaggcaccacctccaacattgaaatttggacaggacaaacatccaaactatatcattagctttcctttgatgctcaacttattaactttttggatttaatgaaacaataaacatttctttaattattaaataactaatatttctctaaataaacacactacttaacaactaatctgccaaaacttaggagtttgagatgtttctccccatttaaacgtagattagcaatttatttaattaaacccctttcaacagttaattttcacaagtccgatgtatcccattctgtcaaacactctaaacacccttaagaaggagataaaacacgcagtgattgaagatcttattcttacgcttacaccatggacttaaatgttttattatttttatcctacttgtgtccttattttcacttttattctcataccttctcagaatagcagtaattttacccgactaacttagacggcagatttcgggatgcaccagctgattctttgtctggacagaggaccttttggtttttaagttcaaaatgatttaaactatagccctggttagtggccctggctggttccactttttaaaaaatttgtttcttttagtagtcatgagattttaggtttttgaggcttttaggcttttgatactcgactttctcactgtcctgaattgtcgttatgtcggctgggtctttaagtattattggaaacacagttatacttcctagtatctcattattattaataagtccacttagaggattaagcttgtgtagtaaattatctgggctatacagtggatgctacatgtgcctttcagctctgctcctcaggactgaggcacttattccctcagtggccaggcccattgcctgctaaccgctcatagcacagtcctttcctgaaattgtcctaggataaagggagctgccttactccagtgacaagttgaagtgggggtacaaatgccgatcccctggcttcagtatgggacatctctgaagagccatttcaatttcagagctccccatgggatcagctcaggggtctgttcctctctgctccatcactggcttacaggagccgttcccaagaggacacacaaggaaacctccatctcaagagtttgctttgagggaatgcacctatgaaggttggtgccaggtataattttaagaagcaaaatccaaactaggattttgaagctggaccactgactgcatctgcatgggagactccaagcaagacctacagaagactgatttagttaagtccctattaaactgtagaattatgccaaataacaaaatagctgctgttttaagccaccacattttggagtgatttgttattcagtgtcagataacttaaacaattataagtaaaaaacaacatagcattctggggagaacggcagacattattataactgataaagatctcaatcatctcaaagggcaggaacattgagtggtacatatgattgtaaacttttacgaaaggagaagtggttcaaggtgagactatgaatgcactaacaggcagtggtaaatggcttggctttttagtcagaggtctgaaagaagaaatactggaagaacggggataaggaggtccaggaaagaggcacataaatggacctatgggaatggtcacaaagtgtgagaatctctgtaatgcaagttgatgccaaccagaaggtatcccatggaagaagcactaaacaaccatgaagacggaatgatgtgttcagttgtcattggccatcctttttactatttaccttagggctgacacaatgctgtcacagtgagtatatccacaaggatggagtagctgtggtcactgaaatagaggcttacatatgggcccaatgacaggtgttcccacttaccatggctgatctagctactgtcactactgaatgtgctaccctcccgcaacagagaccaacactaagttccaatattgccccatcccttgatggcaagttgcctacattgggctccttccactgtagaggaggtggaagtaattaattttaactagaatctacgcatattccaggtacaggcttgcctttcccacaggactcagccagcatcactatccaaacaaaactgagtgttttgttcactgacatgggatctgacataacaattcactggactgaggagcttgctttatagcaaagaaagtacgagagtgggcacataaccataggacctactagtcccactatgtactgcatcctccagaagcttttagcctgatagaacaacaaaatagccttttgatggtactgctgaggtgctagcttagagcagataccctaaaaggatagggtgacgtcctcaaggatagagtatatgccctaaatcaacattcattatatgatgctatttccctaataggtagggtacatgagtctgagaagtcaagggtacatatagtggtggtacagtttactgtcactttccgtggcccatttgaggaatttttgcttccatctctactctaggtctacagttcctgaatttatccactaggcaacactgtataagtctcattaaactttaaactatgagtggcacctagtcgctttggaatccttataccaggagaccagcaagtaaggaaaaagagtcaccatttttgcagagttaatttaccataatacccagaaggaaggactagtgtttcacaatggggcaggaaagaatatgtttggcacccaagaaattgagttgactcttgtctggctaattttgagggtaagtggtcaggtgcagcttgatggcctaaaaagagcatggtaaccaggaatttagatctgtcaggaacagggaactcaagattggcagcgttgctagctcatggtgtgggacatctagaataggaagctgaggtatcagttgaaaggctgagtatcagtttctgccaaggtaacagcccccccagtttgccccagactgtcctggttttatgactgaaaatcttgcatcccaggaaacctctatgttctagttgcagactggagaccagctgcagtggtgggatctgttaagttcgccccactaacctttcccttgcaagctttcccaggaaaagagaccaactggaatcctggaggagttgcttctaaatgggatagacttacaaatatgaagggagtggatttgaatggtacaaggagtggagtgtagggaatgctgtagtgcacccagatccttccttccctatcaaggaactcattccccagaaatgttgctcatagataagtccctcttcaagaatttccctcagtcaaagggaagctaccttgtccaaggtcatgatctagggtaaagcctgatttagtaactggtcaatgcaggggtaggaaagcctggcctattgcttcaccttgggccacttggagggccatcccaactttatgattccccacgggattgcctatggcctttcttgcaattgtatttcatttcaacttcttcctctgtcctgtttctttcactctcttatgggaattgttcccaagaacactccacagtaaaccccctgcctgccatctccatctcagagttcgtttcctgggaaagctagtctgcaacatgccatttcatcatcttgttgcacctggctgaaccctttgcaatgggtcactgtatgcaaccaccatagttaacagatgtgatatataacagagactccccgtgtctctggttatgatacacggccactaatttttccataattttttggcttaccgacaactttttttatgttcactatttcctgccaacccacattaaggaaaaaatgcatatatagttgccttataatctccagaacacattaaaaacactcaaaacaatactttggttttatacttgtaataaatcaatacagattaagcataatttattatgttcacatttcttttccattacaattgccattttgaataatttatattagcatttttgttttgagtgttattgagaattcatggcctttcatgtacacacaaaaacttatttaactataaagtgtgatatcaatctgtgctcaaattatcataagttccccagtcagagtctcttcacacaggttccatttacttttaatactgaccataacactctttaaagcttccttacttattccagactcatctgaattttccttttcacaaaatatggaatcttctaccctcaaaggatcctgattcttcttatagaccaagatttgagtgctaggggtaatatcttgagttgctgattggcaggatgcagttgctgctattggaccactttcagaaatgacaacattggagaagataaatttgtgttctcaaattgatgttaccaatttgacacttcatgttgttttaccttctttactcatggttccattgatcactaagactttgtatcatatttacagccttatttaatttttatgataattctctgaggtaagcattgttatctcatttacagatgaggaagacgaggcctataagtttaagtgacttgtctaaggccagaggaacaagtggctgagcagaactgaatcctagcttttccaagtcatactttcttgtaggactatacttttattcacagggctgaagtcccagaagccaggtttccacttccagaccctgcctctctggccagagttgattgaactaagagtggatacctgacccaagctggaccaactagatttttttcttccaaaaactcggaattaagaatatgactagtcagcctgggctggtcttttgaagagataggatggagtcttgggagttgatattgttaccttctgctcatacgtatatagagacgcttctaggctggcctgcagaaagaaaacaagaagcagattgccagatagatctcctctttttggcttccatccttcccttattccaccttccttttggctcctgagatactcctatatcttcctaaatttcttttttttttccatattgaagccaatttgagttacttttcgttacttacaaccaatgagacttaaccaagacagaggtcctcttgtctggtcatgtttgtggtgctcaagtgttgctgcacaaccttttctccccctctccctcctcccttccttcatcatttctcccttctttcctccccctttcctctttttatttttttctcccaagactgcattataattgtgcattcagattacagagaatccctgttctaacccaaagccattttcctgccaggaatcccagagctacaaactctcagcttcagagggaaagtgaaactgaagagtttacctcccagaatatagcttataatctgttgtctgaagaaaataagcaaagtcattgttcttccctaaaggcagcctcctcttagttaagtaagtatgtctagttctatttacgtgagcgtctgcagctcctttcactgagaaggaaataacaagcacctagaagacaagagaaaacaagacaggattgtggccttttacatgtgtttcgtcatccttcttcaagagtctttaatatagaagaagagagatttgacagtccctccacctgttagtgaagaagagttaaaatgcagtaggtttgtttaaaagtatttgataaattcccactcaatatcaatattcttgcttgctgtggcaaagggaaaacaaacaaaaagaacctggaaataacccagatttttggaaataggtgaatggctgggcaaactatgatacagctgcactttagaaagctgagcagttattaaaaagaatgatttacagcaacatgtattataggaggtgctctatctggggcaaagcctgcttgttacacctcccctcctagctcctcataagtccacccctttcaatgatttttcactgggtacatagctgccaggaaaaaaagattatacttcccagtttcccttgcagccaggtatagccatgtgatcagttaatgagatatgagggaaagtgagatgagcaacttctctgctgtgtttttaaaaggaggtggagagtggggtgggatgccctttcttccccctttcctcctccatcttatttcctggaacctggctgtgatggaaaactaacttaggccatgaggatgaggggtactgcttggagaaggcgaacaataaaacagaaagagcttggattcttcaatatatggcacagagttccagaaagtccctggacttctgttaagtcaggcagaaatagactccttttttagaaaaaaaaattaattttaattctaattttatttttagaaaaaatttctgtgttgttcatttgaatctctgttacctggaaccaaagccagagtctaattaataccttatctaagtagaaatagtaatttagttgtgcagtaatgtgtgtggtatagtatctttaaaaatatctgtgaaacaaacaatccaccttgtacatatgcatatgtgcccagaaacattgaaatgatcatgaaaatggtgggaaagtatatggccaagtttctaacttggatgcccttaggggtggggagggaggagggtgttcctgtttttctttaacatcttttcttcttgttgtttgacttgttataataataaaatctctttttaatttacagaaaaacattatttcaagtcttcttgaaataggagcagctaacatgaaattgcttatttaaaccatgcagttgaaggcttttgaggcagagaagcccagcatgtgctgctatggtagggagctgcatctgtcctagagcttcctatctgtggggtcgttctctcaaacttgcttctagatagaggtcttgctggctcttttatgtggttgggtaagtgctattgggggaagactgattattttgcatttaaaaagaagaactattgtgtttttcacaaaattgtctctagatttgcttccactgtggagtgattacgggaagaggtggacagaatgagtgaggggaataattaagctgcaggaaggcatctttctagtgattcccaaccagctggccacatggcccaggctcagggtgagaagctcagggtgtgtcacacagccctgcatttactgcccatgatgaatacaacaacatcacccacagggtgcagagacagttacatatttgttgatatggcctcagttggaaatgaaaatttggaaatcataggcatcttccaggtcagtaagcagcaataaaagctttcaaatgccttttccaagttttgttagaattgtatgtgtgtttgtgtgtgtgtgtgtgtgtgtgtgtgtgtgtgtgtgtgtgtgtgtagagagagaggaagagtatatatcacacttttaaagtgtcagactcagttcatctctcctatatcccacaaaggcccacaaaggaaacacctgggtgcattaatggagattctctacagatgcaaattcccccacaaaaggcagttttgcaagaccacttcagtctgctggcagccatttcaaaatatgtcaaagaaatatgttttggggtaaagtattttgatttctttcagttcccactttgaacttaaaataagtttcacgtattaaatgccaacctgatagctttggagaaatttgggttagaggttgttagatagagacaaaggaatggaaacacagattgagataaacaaaaaaagagcaggtttttttgtttttttgtttttttgtttttttgagatggggtcttgctctgttgcccaggctggagtgcagtggcatgatcttggctcactgcaacctccacctcccagttcaagcgattctcctgcctcagcctcccaagtagctgggattacaggcacctgtcaccacacccagctaatttttgtatttttagtagagacggggtttcaccatgttggccaggctggtctcaaactcctgacctcaggtgacccacctgccttggcctcccaaagtgctgggatctacaggcgtgagccactacacttggccaaaagagcaaattttaatatatcatcccacatcttctttagctggtctcttagtcctgagaatagatcacttcagtgaaacagttgtgtcctattccaggaggtggcattgcagatgagtgaggcctctatacatgatgctggcaaacagatctttaataagagacatttctatagaaacaaatgttaatgtctggagaaatctacagactagtttttctacagtctctgaagcatcttcagattacagtggcaatctaacannnnnnnnnnnnnnnnnnnnnnnnnnnnnnnnnnnnnnnnnnnnnnnnnnnnnnnnnnnnnnnnnnnnnnnnnnnnnnnnnnnnnnnnnnnnnnnnnnnnnnnnnnnnnnnnnnnnnnnnnnnnnnnnnnnnnnnnnnnnnnnnnnnnnnnnnnnnnnnnnnnnnnnnnnnnnnnnnnnnnnnnnnnnnnnnnnnnnnnnnnnnnnnaagcaaaatgtcgactactttttttccagctcccttacggttagtttgggactactgtggctgggttctggccatcacatgcacgcagaagatggtgtgagacacagaccttggtttttaaaagcctgctgggtggaccctccagattcctctttatctgccactgagacctttaaaggtcatgcttttagatggagtagctgcaagacagaggaacttctgatctgtatagggctttgcaagagcacgttgagccacagaaatgttgggttaaacacaggttaaactatcccgactatttcatgggaaaagaacaatgaagaaaaggagaaggaacatgaaatagttttcacaaacaaaagtctaaaggtagaatcaatatttcttttaggtcaatggttgatggagagaaaaggaaatagggaaagagagaagaaaagacattaaataactctactttgtggttgtattaaaaatcttttaaggaagaaaaacatacatatgcatatatatatgcatagaattttcacaagctgaacatgtcatataaccagcacatgagtcaaaaagctgtagccttaccaggatctcagaagctcccttcatggcccctttcagtcacagccccacaggaacactcaccatcctgacctctaaccgctatggctgcaggttgaccttttgcttgaccatgtggttaaaaaagaatatcactctccagctccactaaagtttctgtattacccagaaaccaagcttcttgaaatttcttaatttttctagttttttttattactagtagagaaacaagtaaagacaacgaggaattaaatgaaacaatgatcacactgattttgatccttagtaaattctgttttagtttaattttattttctttgaataaatcttatacatttttgtgtgtccataagaatttataaaattagttatacatatttccacaaaagacgtcttattacatttaaagttagagattttatgaggcaagttgtatggtcataatccaatacaattataaacaaacaaatactggagagtaaccaaaatagcactacctagagaataaaaataaatagataatacttggtccagttggaaataaaaatggaatttacaatctatttaaaagcagtaaaaataatactttatacaaaaactttaatgatcactgcaaaagctagtctcataaaaaatttatagccttaaatatctttactattatagaagaaagactacaactaaacatattccctatcttaaagatagcaaaaatataaagtaaaccaagaagtgaggattaccgtatctcatcaattcaaggcctgctttattttttattctgacatctctgaaatcggaatgtgtcctcaatttctgttgaccacgtagcagtgtaaccttgttgttattgcctatgcttgtaagaacctggctgtctttcctggtgacatgattgaaatcccttggcatgtcagtcaaaaaaccatttaagcactgtttggggagggagtatgagtactggttgatgtctgcaatattttgaatgacacttccagaagaagataactagcattgaaacttacagagtaagtatcaacagtttagaataaatcttggatgcaacagcagaacactcttaagaaatactacatcaccagcacagaggacaatattatgtgcaaaatatgaacactgaagattgaatccacaatgatttaaaagacccggactctcaaggagaagacattttagaaataccttaagcaaaattattttttccttttatggaggcacaaaagacatgattaaaattcatgcctaaatacatctaaaagagctcttctaataaacacaaataaacattttaaatgataagaaggccttatgttctagattatgtgaaagcactttgtctttctaagtgatatccaaaataatgatgaaatgtgataatatagccaaaagccacagttaaagaaatagaatactaaaagatttgcatgcataaataaatgtgaaaactagttttttgaaaaagttaggctcttcgtgagcctacttaagaaaaaagcgtgagagcaaaaacagacaagactaggagcaagaagagagagctacagataaggcaaatattaaaactgtaagagcatatgacatgcagctcattggcagtctatttgaaaatcaagaacatggactggcacactttttctgttggtgggtcaggtagtaaatatattagcatctgtgagccaagaggtaaaatcaaagccattacgtgggcatttaaataaccatttaaaatgtaatcgttaaacagtgtataaatcattcttagttcagcggctgtagaaaaacaggtggtaggcctaggcttgtgcccatgggccactgtttgctaacttgatccacagaaaaacaatgatttccagataattaccacttccaaaaataactcaagaagaggtagaaaatttgaatagaacaattactgtggaagaaatcagaaaggcacttaaagattgcctagtaaaaacacaccacgatcggatgattttacacctgagtaatatctaatctttaaagaaaaaataatgccagtgttaatccagatcatataaaacgattaaagatcatataaaaaagatgaaaatctcccaaacttatttaacgaaacctttgaattaacattatatcaaaacgaggagttggcaaatagtacacannnnnnnnnnnnnnnnnnnnnnnnnnnnnnnnnnnnnnnnnnnnnnnnnnnnnnnnnnnnnnnnnnnnnnnnnnnnnnnnnnnnnnnnnnnnnnnnnnnnnnnnnnnnnnnnnnnnnnnnnnnnnnnnnnnnnnnnnnnnnnnnnnnnnnnnnnnnnnnnnnnnnnnnnnnnnnnnnnnnnnnnnnnnnnnnnnnnnnnnnnnnnnncatgttcgactctaaaggatcccccagctacttgtcttaggagtactgaagactctcaaagaataaatgccaagatgcattggtatatcaaccttgactctagtctttctcactgtatattattgtttagttttttttttttttccctagacggagtcttactctgtcaccaggctggagtgcaatggtgtgatctcggctcactgcaacctccgcctcccgggttaaagagattctcctgcctcagcctcccgagtagctggcgctacagggacgtgccaccatgcccagctaatttttgtatttttagtagagacagggtttcaacatgttggccaggatgctgtcgacctcttgaccttgtgatccacccgcctcggcctcccaaagtgttgggattacaggtgtgagccactgcacctggcctattgtttagtttttatgtgctagttttcattgtcaagtggctttgcaatagttaataccatctcctccacttcagttttattattatttcctgtttctctgtaacaaaaaagaaattttgacaacacacaaatacatctgtagatctggggtactctttgaaaacttgtgggtttttacactttttaacagattaagacttctgaatcttcaatttaccctgaacataattcagttctgagtatctctggattagcttacttttcaaagtatttatcttcagcgcactgagggagccttatattctctacctagtttgttgcatttccagaatttttgtaccttgttcctttaagtaacagaattaaagcaatggggaggggggtaaaggtagcatttattaggaggacttgcccctctcttccattaacttctgctgactgctttttcattcagttattataggtcaaaagttagttttagataatggtgaatgcctcttgtttctttaaaggatctcttaagtaccacgaaggtcatgctcattccttaagttagtaaacttggcaagggagggtactagatgcatccaagggcatatagcaaatgagcatccaagtctgggaagagtgaacatgttgacgtgttgtcactgcaagattttgctaattgtacccagatggtctgatcttttatacttttgtgacaacttctacacagcattctccttagatggatagagttgtgtgttttttttttttctctcataagctcggaaattccacctcctttaagctgactcaannnnnnnnnnnnnnnnnnnnnnnnnnnnnnnnnnnnnnnnnnnnnnnnnnnnnnnnnnnnnnnnnnnnnnnnnnnnnnnnnnnnnnnnnnnnnnnnnnnnnnnnnnnnnnnnnnnnnnnnnnnnnnnnnnnnnnnnnnnnnnnnnnnnnnnnnnnnnnnnnnnnnnnnnnnnnnnnnnnnnnnnnnnnnnnnnnnnnnnnnnnnnnnttgaattggtggggtctctctgagtccttttgaaaaatcttgtcccaaaaggtcttagaacctcattctcccttgtctgtctgtttttcttttattttttctttcatttctttttgagacagggtatcactctgtcacccaggttggattgcagtggtgtgatcacagctcactgtagcctccacttcctgggctcaggtgatcccccgctgacctcagcctcctgagtagctgggacttataggcacttgactaatttttgtatgttttttgtaatgacaggattttgccatgttgcccaggctggtctcaaacacctgggcccaagcagtctgcccacctcagcttccccaaatgctgggattacaggggtgagccaccacgcccagtcacccttgtcttccttgactaccatctgcttctatcctagaaggaacatgtgaaaggatatataaatgaaaattggagttccagagtaatttatttgtctccatttagtcatgttggcttcaaatctttatcagttctttcacagatatgtttttgagcatctgtcattcaccaggtgccagatataaatggatgaataagacataagtcttgtggtcatggatagctaccactactgacatggcaccatttccccaagagattctttctgtttccagaaaggagcccaaggcccagtcctcatctgggtattagatagagtgctttattttcaacagtaaataaagggaagatggttgtagacatttctgggtgaagtgttagccaagattttctaggaagtttatatcctataagtgggtagaaaaattgggtatctaaacttcagataaaagtccaacactttaatctaccatgtgttgtctgcagatgaattcaaaccactgaggaagtttatacaggttagtaaaaactagcaaaacaagaaatggtttttgaaaaaacaaaatttaaaaattctattatttttgtcctgactgttaattcgtttctaatgtatccagttttgatgccaaatatcagaaaacagagagctcaggcattctgggaaagtcaataattgaggctaaatggcttcagtataatgactaaccaggaagactgactttctagaaagataaagtctcagagaagacatgatccagatttatgaaatcatgaaatatgcaaataaggcaaatataaacatgttcatcaaatcctagaaacattttaaagctttgaaaaagtaattttagggtagatggaaggtcccaggaattgtattttattgttgaccttaaggtctactctataggattgctgaatataaactactttaaaaaaattttttgctattatagtaagtagccctttgnnnnnnnnnnnnnnnnnnnnnnnnnnnnnnnnnnnnnnnnnnnnnnnnnnnnnnnnnnnnnnnnnnnnnnnnnnnnnnnnnnnnnnnnnnnnnnnnnnnnnnnnnnnnnnnnnnnnnnnnnnnnnnnnnnnnnnnnnnnnnnnnnnnnnnnnnnnnnnnnnnnnnnnnnnnnnnnnnnnnnnnnnnnnnnnnnnnnnnnnnnnnnnnctccttcccctatttttgtagcttttgtgaaccctggtcatccctagtgggaaaggcggcatctgtgcccctctgcttgactcaggtttcccttctctgggacgcctccccagtccatccctgctctcttcattccttcagtgacttgtcttgctagtctgttagctgtttctggcccacaggatccctgcatgtcccatacattagctttcagtgcctgcttcagctggcactctgagtacaagagcttagaaccaccaaatcacctggaaagagaaaatgactttaaataaagcattagccaaacacaatcaactttgtaacaaaaatttattaggattaagtcaaattagaaaacttcatgctccaccacttgtcatatttacctgaaatgacaaagttatacttagcttgagtgtaaaacttgtgccccagagattctgtttggaaagcaaaaaaataattgatgcacatagcagtgtgcctgataccaccacagtgaatgttgtttaaggcctaacaaacagtggtcagcaaagcatacattacttttaagctttgggtccaaggaagatgtcattccctacctccttcaaaagcagactcatcatagcctgggcacctaggcctggagcctattttttcgagtctaatatgaacatctggatttcaagaggtgctaggcttgaggtatctttatggcttaaaaggcacaggtcatgcagctgaattaaaagctatcatgttggtctctggaatgcaggcccatgagccacgccttgtaagggggagacctgaggccctgtccttggctcctcagtgtaacccacacatcattggctctgttcctctcgccctgctcctgcactgctcatcagctgtgaatgctggaattggaggacaggttggggctcctgcacagtctgctgccaggtagagagcaacacaggctgcagaatcctaccctccagcatatcgcggggagggggggacctgctgcacagccaagaagtgactcacatgcaggcaaggacgggaaggcttgttcttcaggcacaacgtggtatggggagaagaaacctggttttcttggaatggtcctactaagcttgaaagtggtgctgcatttagggcagggcacacccagccataggcaacccctttgagcgatgggagaagtagcataagaaggatgccaagaagaacaataggttcttcaactcagtgtgggctctgggaaaccatcagcagtgggtacggaacacttctctgggctctgccctggggtcactgagagcaaatgggagtcaagtcctcaaaataagaaacttatcacttactaaatagctgtgcattcccttcagcttaggagcaaaatgtttactctcagaagctttcttttatttttaaactctccttaatggagggaataaaatccagaatagaagtgaagggcctggagagccgcattcgcagcagaaatgccctgaagacccagcacagctgtcccatcctccagcagctagactcctgatacctccatccccaccccagccaatccagtaatcagaatggctgctgtcaaaaaactaaattcatttgcataatagagagggataataaaatctcatttcttcaggcaccagaggatccatgtgacaaggctttgattctctccaatttatgctcttaatatgttttccagcctctcccctgtactgcctcatcagcttggcttgtattcctcagtgagtcttgcattacttgtgattacatctgtactcttcatgccaattaattcaactgggattgacccaaagtttgctcaagcttgagttcatagcctcccaggccgaggtctccctcataaatgttttccttgcctggcgtctggggtgaagctttctggtccagacctagccttgcaggaggactgcagggtgaggaggcttgctcctggtaatttatggctagttcatcctggtttacaatgcattccacatcatcctcttttagctgttcgttgggaaaagagagagaggtgtcacttcatgatgaaggcagaaaacaatagcagtcctacaatttttttttttttttaaacagaatgcatgttttcctttctgtaactgccctgtctggccttggctgatgtttctgctgcaggcatggtacagcctttccctgagtcagcattgaatatctgatgctgtacagccataaggggtctctaagtctgaggtaagaggtgttaaagagcatggtactttcatttcctctttgggttaaggatgtttccaccactggtattaactagggttgacaggaattaggagttagcataatcctatgatctcagaataggggaagattctcatgttggttttgtaacattcctgcctatcaaaaaatccttgaaacacagttattgctactttttttttttttttttttttgagacagagtctcactctgtcatccagcctagagtgcagtgttgcgatctcagcttacttcaacctctggtctctggggttcaagtgattcccctgcttcagcctcgcgagtagctgggattacaggcatgtgccaccatcacatctggctaatttttgtatttttagtagagacgggggtttgccatgttggtcaggctggtcttgaactcctgactgcaagtgatccattcactttggtctcccaaagtgctgggattacaggcgtcagccaccacgcctgggctcctgttacattttaccttaaaagtgtgtcttctcagcatatttcttgggaagagtatcacaagtctagaaatggctggaagtcaccatagtggataatgccagaagctaactggatctggctaataataattttttccatacagaggttcccttgaaagaattaagatcccaactcttcctccactggctttgggaaggccatactaaactacttgtagaatgggcccttgccgggggatttttagggcagtggtttccaactttcgcctgtcccaggatcacatggagggcttgttaaaatacagatcatcgttcaagctcagggtttctgaggcggggcctgagagtgtgcatttctagcaagttcccaagtgaggctgctggtttggagactactgtttgagaaccactgccttaggcttctgtgccctgaacacacctgagataagtttttgcctgtgtacagggctagccagctggacacttctaagggtacttgcaaacctaagactgtgctcttctccaattccctgacctctgatttgtgagtaatgattctaagtgcctctcagcatttttcattccactcccttgagccataaatcacaggcctagtattcaaaacctcaaaacctcaaaacacagcagtttgtgaggatgcttcttttacattttctaaggtcattttatggttaaaaatattggtaacaataaaagagaataagccaacatcagcaacaattgacaagagaaatgcttcctagtgcagtgaatttttaaaaaatgcttcctcctcaggccgggcacggtggctcatgcctgtaatcccagcactttgggaggtcgaggcaggtggatcacgaggtcaggagattgagaccatcctgggtaaaatggtgaaaccctgtctctactaaaagtacaaaaaattagctgggtgtggtggcaggcgcctgtagtcccagctactcgggaggccgaggcaggagaatggcatgaacccgggaggcggagcttgcagtgagctgagatcacgccactgcactccagcctgggcaacagagcaagactccgtctcaaaaaaaaaaaaaaaaaaaaaaaaagcttcctcctcaatcctgcaagtagcaggctttttgaggttcctgggctcatcgatattcaccaagtctgtcccacaagggatattccctcaccctagaggcctgagatttacttaccccataggcttgaggactggtaagcagcctggaaatcggaccacaccattcaggtaatgttgtagtcagcggaggaccagagtgggttaaaattggtttcagatacctgggaggcctgttaaggaatacttgtcaacagggagttaggatttaggaatcttacgctgcacaaacctttgtatgctgagacagctacgtttgcctttaaatcccctactccctcacttaggaagaaatttgccctgcaaaaattgctgtttataatctttgttacacatacttttccagccttcctgatagcctttattcatgaagaaatggtggatggcccatgctgcatcagaagtgtaaatgtgctcttcccatcctatccccaactcaatgtctcatttgcttagagaatgcattcttaagaattaccttaaaggataacataaaagattgtattttcttaaaactgtacacacgcgtagcttaaactgccagtaagttttacaaagatgcaagaggtattttataaaatgttcagttattttagagctaggtagtgaacatagattgttttccaaaatacttactttttcactattcaacagtcactttaaacttcatacatcaatggatttctatacaaaattatgtaaataagtcggtgctgggtttattctgttgtctagcacctgtctttctcatctcctcattccaaagtgctctaacaagagaaaaacttgttcatctaaagccattgtttcctccaatctatcaataatgaaatccccagagctgcctcaggttgccttattttagtttttttgctcaaaggaaagcagtggaattatttcagcattccatcagaaatgacttttaagctttatattacttcctctgctggagagtatttcacttcatcaactttccaaaaagctatagtaaatagggaaagggaaaaaatggagaggagttatcattggttggatcatgaagatccgcagctgtgctcaggcactcagggcatgagatgatcttggtgatgcctctggtggagtccatccatagctggataattcacatgccattctcatgataccctgagcatgtgggcatagagggaagatgcagcccagtggaggctaaagaatctggtacttctggcttgatgtatttgtcaccaaagcaggccatgcacctgaacgaagccttgttatgatgcgaggagagtgactgggaagatgttaggagggcctgcaattccaattgcaaatagaaaagttgatccctcctttcagatgggcagctgttgtgcccagttaggtgaagatattaaagttcagagcctggtatttggtgtaatatcttgtaaatatatctacaaatctgaaaagctcttgatgttcttttaattttcattagtgttatttctttcattttatgtatgaaggaattgaggcctagagatataattttaaataatccaaaggctccctctgctatttgaatcctccaatatcacccctagaagacaattctcagggcagggtcagggtttgcaaccagctgggttttctggagagcaaagcacaagatctcgcccctgctggggagctgcagactcaggctggggtacgtgatctttctagggtttacagtaggtatgggtcaataaaaatgtctttatggaggtgaggtggacaagatatatgtacaactggagtacaaattaaaaaaaatccagccaattttatttccaggtggaaggatggaaaagtgacagcaagtaagcaacatttttagtgatgtcatgttaaaagaaaaaaaaaagtttgtcaaggctctgagcttgaaagaggcctgagcaacttctgctgagaggctcagcatactgaaaaagccaaaataatgttacaaaagtaaaatataagtttaggattgtgtaatgaacacccttaaaaaatcctgatgaggttattatctctttaaatctatgcgtagtagtgctcctttatttatggtttgactttttatggttttagttacccatggtcaaccacagtccaaaaaaattaaatggaaaatccagaaataattcacaagttttaaatcgtgtgccattctgagttgagtgatatctcgcactgtccattccatcccacatgggacatgaatcatccctttgtgcagcatacacatactgtctacactacttgccccctagtcacttagtagccattgtggttatcagatcgaaaaagcatagtgtatacagagtttagcatatgtgaggtttcaggcatccatgggggtcagggaacatatccccagcagaaagggggtacaactatataatactattggagtaaatgcttaaaggctaatgtgtagcttttantgagtatgaggactannactnnnnnnnnnnnnnnnnnnnnnnnnnnnnnnnnnnnnnnnnnnnnnnnnnnnnnnnnnnnnnnnnnnnnnnnnnnnnnnnnnnnnnnnnnnnnnnnnnnnnnnnnnnnnnnnnnnnnnnnnnnnnnnnnnnnnnnnnnnnnnnnnnnnnnnnnnnnnnnnnnnnnnnnnnnnnnnnnnnnnnnnnnnnnnnnnnnnnnnnnnnnnnnnnnnnnnnnnnnnnnnnnnnnnnnncgaaagtagttcatcacataagcatcatttttaagggtgaggacaggtataaggtaagccataatcccatttgtctctgaacccagacatatataatggtctctgccagttgttgcatcttgtctaagggctgggatagatacttgactcaacaaaatgaatactcaatgttatacttgggagtggattaacaaatgatcatatctcagcttgtggaagaagactttttgcccactgggagcatttgcaagtgtttatagacttgataaatggtcttgttataagggtaaaatgcttgtcagcacacagctgtgtgaagaaggaaagcacatttatctccatatctccattcaggaatactgtaccctacaccctttcattgatatagcatttccatatgtcttattttctctttacacttgtaattgggtactataatcccattttacagatcaagaaatctgtaaacagatggcttttctattcccttctattcttactaagatctggacactaaagattgctacatactgtggggtgctggcaaatggtttaacaattgactctctgttggggaagaaaggctggatttgtagcatttcccaatttccatggtgtataaatactcccactacggctaatttcaagctactgacacaaagttactgactctggagttgaaaaaagtgtacaaactgttggtgtgaactggcttcaccatgccactggttatagatctcatgagttcttatggatatttccaattcaaatatttctgtttttcaaggacacaaagaatcaaatgagaatattccacaatgattcatttgctttctcctagatcacagacacaaccatctcagaataatactgataatgctaccataacaattacctaaaacattaaaatatttttgccatatccttgcattctgacctcccatttacaaaactcctgcagtataactatagatggttgtcatatatttatattgtctggacatatagccattacagtctatattgtttccctcttaactatcatttagtcctagctaaatgatcaggtgactactgatctcatgcctacctccaggccttttgtcaatttctctctagtcactttgattgtctgaagcttgttcttcagtagagttctcagcaagggttcatgggaacaatattctgaggtcttgtatgttgataatagttcgtgcctattttgaaagtcattttgctggaaataaaagcattggcttatactttgagcacattaaatgtattttatttcttttgacatgcaaagttgttcctgaaaagtttaatgaacttgtggaaactttctttctaccacaaatcacatgcttccccctgcccccaagatgcccaaaggactttttctttaaagttcattaattttgttaaaacttatctaatgtcggttgttctaggttgatgtctcaggtacattgtgtgctctttcaatgtatagttccaagggtgttatttcaagctcgtttttaggagcattctatttccttgctctgcgtttcttctttagggactcctattctctagatgttcaatttcttaatcttcaatatgtgtcactttctcttgaattatttttatttctgatttttttcttccccttcacctggtatttctcttaagatatcaattgtgtttattcactttcctattccttctaatttagacttgatttattaaatgactttttctatttctagagtttgtttttctaattctttcatgtcttgtatcattttcttagtctcttaacttgtttgatgtaatatgttataattttgatttgttttatgagcatgtctttccggcatggttttcattgtttgtaggaacattattctattccacaccctcatttttcttataatagctctgttataggaactgacctctattcgtttctattattcacttttacgtgaaattcattttcctaagagaatgaggcaggatttagaaaactttctaagcttcagagttctctcttcggttgttttttcacagtgtgaaatatggcggtttgcatgatgagctttcctgctgtttccctccccagctgatctagacctagtctgtctttcccttgtctctactgaccctatcctgctcaattctaattcctccaggcagtttctcctcagtatagggccctgtcctaggagggagcccatgtggatccattttgaaagctctcaggggccttgacgactccagcctctgtctaccttactgagaccatctagttactactgttagagaatgtgatagcccaactccagttctaaggatgttttcaaaaacattccaactatacttttcagggaataccgttgactaatcttcaggtccatccgatgctactccattgcttcctttttcctgctgcatatacttgtggtattggtggtttgtctctgcccacttgtaattttagatttgctgtaaatgtgtctctgggtttttggttgtgatatttaattgttctgcctgtttctatgtagggatttggagggattgaaagatatgcttgtgatgtcagcgccatcttctaggaagcgcattttatctgatcttctatctgtgttgaatagtagagtgtctagcatatccccaaggaataggagacacatgatctaggtagattttgatattgttttctgtaggggcttcataagctgactaggaactgtccatgagtcaaacaatgtagcttagaattatcaaaatgaacaacctatatcacaactcctatatgagtcagatgatatctgaaaccatggttcttaaccttccctggctgtagagttttgtctaaaaaaaaaaacctccaaaaaaactgcctacatgcatgttatttgcatacaatttcacatgacatttcagagagttttcagatgccttgaaacccatccataaacccctagagacctgagttaggaaactctggtcagggatgattaagtattaataatgagggcagattaaaggctgataaagtggtatgcttagtatcttagtggtattgggagttggttttagcaatgatatctatagcatctacctatcaaatgttaagataactctacttggctcctcagagccagccaggcaatcaagggacagagaaagggcagtggagttggttggaaaagttaaaggaaagaaagtggttctaggataccaaagcaaccagcttaagtagggcagatggacacaagataaacaaggggccatattggaatcatgaggctggaggaaacctgagagttcatctgatctatatccttggatcttaatacagaagaaagtcgaaacccagtgtttccctaagtgtagtctcccgaccagctgcatcagaatttcctcttgtgcttgttaaataccattcctggggccttgaagctaatatccttgggcaggacctagtaatctgcatttcaacaatgctctgaaaaccactggagcagaatggtatctggtctcttgaaaggctctgagttgggaagtgttgcatctatgaactgcatagtgccatggtaacaatataaattttaccactattaggtctttataacttttccctttggacacacagatcaaaagatttccagggatctttgccacctaccagatacagataaaatccatttgtgccatatggatagtgttacatttggctcaagttgttttgaaagaaaacatttctggcgaagaatgctgctgccacttgcatagagtgagccttggcttttagtggctttctggttagaggaagtgccaccagacctagatgccctctgttagcttgtggtgactttgacaacaggcctttgaaggtcacttccctgacaatttgttggagaaatgaactctgagaagcaactgtgctcctccgttccaagtcttctctctggtttggggaaaaatttccacttgatttctgctcccaacactgactggatgtagtcctataagcactagagttttagctagctaccccagagctcacacttaagataagggtggcagctcatcccatactccctggggctgggtcccccgcttggctcccaaaatggagtgtgtgcctgagaatgatggtatccagcttcatccatgtccgtgcagaggacatgaactcatgggcaaggatcccagggagatgcataatcatctcctgcctctgaaaagataggaaccattatgtctgcaccagcaactgcagtgtaggccccacaggttcggattctcagagcactaagtcaaagaggaaactaccttcagtgcttacacggggaggaagacggcaaacacaaaacgcaaagggctgggggtctagctgctgtgactgctgctcagtttgagccaaagtcttcaaagctttatgcctagatttttctcattactaaggagatgctagatgctgtgttagatctggtttggtaattatttggagattgtaattattttgtctattagtttcatagggctgccataacaaagtacacaaactgagtgacttaaaactgcaaatttattgtctcagttctagaggctaaatccaatatttctgaaggctctgaggccagcaatccttggtgttccctggctggtagacgcatcgctccaatctctatttctgtcttcacagggtgttctatgtcttgacatgatcaccttcttacaagcaaaccagtgatgtcagcttaggggcccgccctgttccagcacgaccttgtcttaactacatatataagtgaacctatttgcaaataaggttgcatttgaggtactgggggttaggacttcaacatgcctttgttggaagaaacagttcagctcagaacaccttgctacttctaagtaatcccaagttttctgtattttttttaattgtagcagttaaaagacaagctgagtttgaagcatagctctgtacttattatctacaagtaggcaaacttcctgagctctttgaccacaaaaaatggaactaactaacaggagtggcctcatacaggagaagatatactttctagcacagttctgggcacataataagcattctataaacgttagctaacatttttttcactgtgtcccttgagttacaggtttcagagatatatttcaaccatcccaagtcaatttactaatataacaccttccacatgccctgcagtgttcataacattcttcttctggcttctggagccctagaaaaatattgccaagtttttccctgaaggtttgcttctcttctcagagcagtggccccacatagaggacccagggaggcactgctcattgtttcatgactgatgtcacagtttcacagcagatttcaggtgagacttacccattagggtcctgccataggaatgacccatgtttccacacaagtgaggtgtttacttagaaggtgggtgtcttcatgttgggcatcagatttttaaatttttttattacactttaagttctgggattcatgtgcagaatgtgcaggctacataggtatacacgtgccatggtggtttgctgcatccatcaacccgttatctacattaggtatttctcctaatgctatccctcccctaaatcccccaccactcaacgggccccagtgtgtgatgttcccctccctgggtccatgtgttcccattgttcagctcccacttatgagtgagaacatgcggtgtttggttttctgttcctatgttagtttgctgagaatgatgctgttcagcttcatccatgtccctgcaaaggacatgaactcatccttttttatggctgcgtagtatttcatggtatatatggggcattagatttttaatgtcaccttagagcagcctttgtttttatttaagaaaaaaaacagggtcttgctctgtcactaggctggagtccagtgacaatcatggctcactgcagcctcgacctcctgagctcaagcaatcctcccccctcagcctctcgagtagctgggactacaggcatgtgccatgatacccagtgaatttttaattttttttgtagggacagggttttgtcatgttgcccaggctggtctcgaactcctgtgctcaagcaattctcccgccttagcctcccaaggtgctgggattataggcatgagtcaccagggcctgcctagaactcccctttcttatgtttgtttctccggtccctgggtgttcttgaggccaccttctaactttcccaaactctatggactcctggccatttagcaaattcgttagaatgcatgccctgcagctcttttagggaacaaaatgaatacacacacacttcccaccccagcaatgttgactgtaacccattgagtttgttatacgaatccaggtatgtaacactgggttatttttgagctatggaatgaagactgttcaggagacttcagaaacttattttctttgagcagacacaaggagagccctttgtctttatagggtcacatgtcacaaatctcttctcctcctagacatacttttttcctcagatgtagtccctttgaagcctttttaaaacatctggcctctacctagaactacatttttttttttttttttttttttgaggtggagtttcacttgattttgcccaggctggcgagtgcagtggtgccatcttggctcactgcaacctctgcccccaagttcaagcgattctcctgcctcagcctccccagtagctagaattacaggctcccgctgccatgcccagctaatttttgtatttttttagtagagacagggtttcactatgttggacaggctggtctcgaactcctgacctcaggtgacctgcctgccttggcctcccaaagtgctagaattacaggcatgagctaccgcgcctagccagaaatacattttacaattgttacttagtacatgcctcaacattttctcaaccacacacatataactctaaaatccttctgtgatgcacttagatatattctgttccattccatttgtcttctactctgtttatactggacattgctagctagtatctgccaatatccagctctcttctttcaggtgcctgaagtaggtgcggctctaggactaattctggccaatgtgctatggttataaagggatagcatcacttctacactgaaacacaggaagccagcaggctgaccctctccctgttacagtgacccagggaggctccggtgaaggtggtaaagccacagatcagagctgtttgcatcactaagttgctacatggaggacatttgccctagagaatcaccacatccttagcagcctttgagagaaaataaaactttgcttgatgagccactaagagtttagaaatgtttaccacagtgtagtctaacctattctaatacagtattctatttcattaaaaaaatgctggttctgagttacctaaatgattccatgacccattatgggtagtcacatacagtttaaaaatcattctcccacagaattggccacatctgtagcaccaaagtggagacagggagcaccacagaagacggagagcacatactagcactgccttccctcagggtcccaactctttgggatgagttgacttgaggactacacagtgtgtgtgactacagagagttagattgcaaatgctttggcaggggaggcagcagggactagtccaaaactgagtggtggactttagatcaagattcaggcctcatggatcctgtgttttgtcaataggcctatgtgccttgagaatccagactacaagtgcatcctacttttattaaaagaaactgcagtacaaaggcatgattgctgctactttgctcaagtggttgagatcagaggcctccatcacggttacgtccttgctagatactagaactgcactgtcctccactgatcctgccccacttacctttcctatctcattccccacaccgtttcacaaactttagtttctgataaaggggaatcaggctcaatgtcacttatgtttcactatctctctgggcctttgcaaatgctgttccctccatttggacagcttttcctttcagcttggcacttggaaatcctaaatccattcaatatagctctactgtcattgcctgtgaagtactattgatcttttagttaccactctcttaggacttgtcactctctcttacattctaattattcaagtacagttctcttcctgttgcactttgaaccagagttgcttctcttacctttattcatggtgggttccacatcagcaataaccacaacacatacccccccaaacccacaacccactcagaaaaataagatttactaaggttgacctggaaggcctttctagactattgagtttccaatacccaccaaatactttacagacttttatctttgcatgttttgttcctattaccagaaatgtccttcttcactttgtctttctgggaagccccatttatgcttgaagcctgttgcatagattgctacttacctactcaatatccagtctccctctcctccttacaatataagcctgaatctatggaggtgttctatttcctcagaatgggtggccaatgaaatagaagttcttgagtggaattctagagaagcctctcagagcatcaattctgccctttctgccttcctgtctggaattgtaatggtaatggactctctggagctccagcagccattttgggcccaagaagcaaacttgaggatagaagctatataaaaagataaagaagaaagataggactgtggtggcatcatggagctctgttaaccatacatagattgtctaataccagacttcttttagtgagattaaacaccactattttcattaatccatggttatttggattttcctgttatacatagtcagacataatcctaatggatactggatccaggacccaattcaaatagtacctcttctttgtcactattcctgtgacaaacacaggaatttcttcactggggtttccacagacctttctgtttccattgattatatcagaattatttgactatatatctcctctcttgttagactgtgagctccttgagggaggggcaagtctctttcctctttgtttccacaaatgcttaatgcccagtaggcagaaatgagtctcctcaatgtttgttgaattgagacttgaaagggatttagggctttatgttaacatacaaattcttctgggaaaggtattatctgaaacctccaccttattttggacttagttgatagtaatatagtcaggaaatggcacaagacggtggccttagggacaggggtgtaggagacgggtgggcactgggctggacactggaaggaaaggtgggaaaaacagcagccatggatctcagcctgtctggatttccctagggcagttcttgtttgcccttatactttcctgtatatacaatctcactccccctggaaagccctagaggagactgcctgcactagaaatgctttacattgccctccagcctcactgagaggcaaagctgctctcctgagactgggtatcacagataactggctcctcaggcatatctgtgagtctctcctgcaagccccaaccctgtccccttggtcctcccaaaccactttggaagggtgcgtcactcttgagttgcaagattaaatgaatgtgtgtttggataagatggtttcaggcccaagatcaaagccttcactggctgaggtctagacccctttcagagtgagtataaaacctccctttggggtgaattatgagtgcaaacggaaagtcctgcccatatccaccatatcaacacatcttctcaggagtagagctcagatggctccttgtaaactggcatggctgagaaaatggaaagatgtactttctattaaaaccactcaagttttattggcacgaacaggtatgatcctttggttaaataaaaccactagagagcaaattaaaccatgactcatgatatgatcattctctccttgtaaaaataatgttttggtagtttgttgtgtgtccactttaataaatagttccaggaccttttttttttttttaatttggtaagtcacagatccagatttaagccaaacccgtggcaggagctgtcctgcttgccttgccacagaaaagcaagagaaagcatcgagtcgttatactatttcaccctcctaaatcaaaccttccatttacttacgattatttaccattgctttgtaactgtgaacaggcagctgagtggagctggaagtctattcattctttaaagtgacataaagtggcacttggagtcccaaatgataattgttcttttctccttgttaatatccaactgctgttaggagttctgtgaaagaagattcatttaatgccagctccagaaatttctgtgggatttggccctttctatttttttttttttttgaaaccaaatttgaaatcaccctcaggaattgggaaggctgaattgattgtgaccttcagccagaattcgtctctaaatattttagcaggatggagaattttccctcatttatatcccactactaccgtagtggccatgggtgggaagtattctaaaatataatataatataataccagtttctaaaatataatttctttgtagacatttttaactcaacctgagtcttaggaaactagaatttagaaaggaaactggatcttatgagatttccacttcaacctaatagtacctcagtgtctaaacattctcctaatcatttaaatactttttcaaaaaacttgaagtcttatgggaaccagcctgcaatgctgggagggtccctgctgttcagtcacgtgttcaggggcttcccctaccccacaatgaagtcgtcgtttatgggtaatcttccaagcccagcaatacttatgacaaaatgatacagacagctctatatgaagtttcaaatacctttgatattcctattgatatatcacaaatggggctagggaaggtaaatatgtgctgatatcaatggttctttccacactattccatccatactatggatgagctcctgctattcttgtccccaaagtctattcaactctctgatgttctggctcaaaactatactatatatttttaaatctaggatacatgtgcagaacgtcaggtttgtcacataggtacacacgtgccatggtggtttgctgctcccatcaacctgtcttttacattaggtatctctcctaatgctagccctctcctagccccccacaccccaacaggccctggtgtgtgatgttccctgccctgtgtccatgtgttctcattagaactacactattaatggtgtctggcatttgtattggaagctctgtgctaagtactttacatgaaaaatctcctttaatcctaggagatagttttatcattatcctcattttatgggtctggaaactgaggcatggggaggcaaaggagccagccatggctacataagtatgaagtggtgaagccaggatgtgaacataggctgcagcactgtagtctaacatgccccctctttaactctggagctcagtgcagcatgatcccttccctaggcttgaaaagagtttacagagcctcctctgagaaaagacctccacttctctgcattctctgaggatgcttcagcagcatcatacctgaggctgtcaacccagttgacaataacttgggagctcagtggcatgattcatggggctcggattggttgggagcagaactagctgcaatttgttagtaaagattttctatggcggggaggggttattagagacttccatttgcaatggttgcagtgttaatatttttgccacaggtgtccaggttgttttaaggaaaaagaaggggagaggaccatggaacaggagctgagaactctttctccctgctttctattaaagttttgaggaggttctattcatgagccgggtgttttgagcattttagtaattagaatacagttgaggaagtatgggatgtggtttataaaccagagcctaggaaaggctggaatatcagggttagtaatatgcccagagctgaaagattctcttctctttcaaccaaaaaaagggaggtcaaggtcatggaaaaggtgatggttttagaggctgggaaattttcatattccatatgccatctgctgactgaatgctagttattttctcctaattgggcttcctttttctgttgctgattttaagagtgctttcgaaggagggtatatgtgtgctctggaggcagtagtggtaggaaggggtgggggtctcaataaaccttcccaggacctacttgagagctttggtaaagccttgggctggtgcacacagacctgatggacatacaggctgtgaccttcctgcagatttggagaaggccaagccaagcatttcagagctccttctattggctttgcagggtcacaggagcccgatgccattcagagctcttggaataaatctgacattctgaaaggagtccaaggcattctcagtacaggcagaggccagggtctcccagatcattcttgtttactgcctggtgacattccttccaaatcccaacctgcctttcagctggggcctcacagaatgttcttgctcagactaaagctgccattgttttgtgctgtggggctatgttcttttctgttgattcttcccagtttagggatgtggctctagatctaggtggagctggaaagcaatcacaccagatttcaatgcctgcagataaccctcagaatggcatcttctggtgctttccccaggaagcaaataactcagattaacaccaaactttttagcataatacttcctagtgtctgacagactgtgaaactggtaccagtgcaggtcacctttgggtcatgatagcccatgtcattaggaatcttaaagcaaaatgaggctccactagttctggacctcacgaggtgtgcgtcagcaaaactctccatgtctcagacccttctctgtctcagtaccttggtcaccactgtccctacgtaccttttcctcagtaattcagaactcaaagcttggattatctgagacactttccctcctccttccttctggtcccacttgtgtgtgtgtgtgtgtgtgtgtggagcggggtgcagaataactgctggcaagtggggaaggcccaagaatgctcagcaagacagctcaagatctgcactgactgggaggaggtagcaaaagctgataacattccctattttgtagtttgagctttggcttggtaagttcacatcctgggtaaaggttttgctttgccagtttagaaactcactaataaagcaaactgatttatttgatgactcgaaatagtctattatggggtagacatcaaaaagtgctatggacaagaagggaaaaaaaaacaacaaccaaattcctttaccccatctttatactctggaagtctccattccactgcttgcctttggtagcttctcttatgattctgtctcatttgtatgattcacaggttactgaagctgaaagaacctggagcagatcgtccattgttctgagttattctagcaaattctgtttctttgcccacacaatgaaggagctgactatataactgttcccttagggtttggaataattcccagtgctgctattcatgaagtccagtacaattactttcccattttctgctcagcaccttgtccttcagtgctaatggaataacagtgaattcatagaattgttacacctacagaccttctcactgtaattaggaatggccggggtgaagaggagcattcacatgaagtgaactgcaaaggggattttagagattaaaaaatttctcagagataagcaatttgatttttcaagaagggctcaaaattacaccaactgcttactttcagtataactaggatggtattctccagtagattctggtctgtagagaaaaaaagtcttcctggaaaaaaaatttaggcttttgatcaatttgtttttattcagaaaagctgaagtggaattaattttaaatgtggagaactggtcattgcttctactgctgacaatactacaataggaaaaaatggaacatttccttctgaacggaattgtagtgaattgagaactaaagagcttatggaaaatagccttcaaatgattatttttgtttgcttaaatgcttgattatgatgattgtaatttcagctatacatagagtatagggaaaaaaaagctaagcctgggctccagttattaaaaaaaaaaacaaaacaaaaccaaagaacatatcacattataaaatccaaatgcccataggtttcttgggactgctaagtataaatacgcagctcaggttctacttgttcgcattttcgggtccaagagttcttttaggatctctttaaaagactgcccttggccctggatcactttaacaacttagaaaggaaacctgaattttcttgctttgtatacaaaggctggtcctctgaattacaaaaggaagactttggggggcaaataatacatcttcagctggctcaggttctagacattgggctcattctggtcactgacccagctggttgtaggtacgatgatttcatgattgctatagagagcagatgcctcctcctacagcaccatctaccaagcagagccctattggcagtgatgttccacaaagacatttttcttctttgcttggaaagagtaggatcattacagaaatgtggtcactttaatttctcagaccatgatcaagatgaataatattaataaaacttgaggccaaggacatacagctaaaaatggtcagatagaagactagaggacttcaaatgacactggaagatccaaggactatcaaagcaagttaaagctctaataccctcttacctaaggcaaaacagatcccattgccccctgcttccagactgtaaaatgctccctggtatgtctggtgcacagggaagcagtggcaagtgaacagacatggctggtggttgacttagggagcttgtgaatgactgagagcatccactgtcagactttaaacccattttagcctgaggcaggactgagaccacctgatgacagctgagctgtcagtggtagggatgacaggaggccaagggctctgtaattagcatgggtgggagggatgcttacagggcccttgtctacaccagctctgttgtggggctaaacagaggagcttagcattggaggctcaattcactgcctcccaaacaacagcagccagtgattcatcgtgccagtaacaaggctgctccggtacagtttgacttggctttttgtttcatttagtttcaagaatgtttctgaaccattatttttttaaatgtccctttgtctttacccttccagccctgaagctctggcgaaggctaaggactctcagagatgcagcaagagcactttatatttgtcctgtccaaaacgaagctcactgtatcgctttctcccagatctgtttctccctctcatgccccctgtctcattgaacatgtcatcatccactttcatgctcaagcatgggtgctacctccaactctttcctctcccttctgcacaacagtcaatccatccatcaataagttctgtctactccacctgccaaagacctcccctatccatctacccatctgtccatccatctattcatccatctactccctttatcccacagctgctgccagcacccctcccttaggtggctgcaaccaccttctcactggtctaggggctctgctgatggggccagctccctgctccacctcccctcccattcatagccagagaggttcttctgcaatgctgaccagatcatgggactccctgcttacaacaccatcaaaagcttcctgtggcccttagaaggagtgtaaactccttaccctgagacatgtctccttcgtaactgcatgtgttgactcctctctctgctcatcatttgtacttgctacttcttccccttagtgtggacttcaccactgtccctagctatcttatcctcagtaattcagaactcaagggtcagatgctctgagaaaccttccctgaccctccctcctatggtcttctacagcctgcacccaatataactcagggggaggagggaaaccatgtaatctattgtcaaaactaggacagagttaaagggggcacctgtacatactgtacataaataataggcataaaatgggatggtccaaggcaaaccaggatgtgtggtcactccctaatcatggcatttgtcacacctgccaggcctcccctacctcacttggcagactgcaagttccttgatgacagggaatgaccagtttttaatatagttgcttccatagtttatgttcaatacatatttgctaaataagtgagcacagggatgaatgtggctgaaacaacaggaatctggtcacacattcccagatttgagtctgatgggaagctacgtgtctgtaaacactgcctgcaggcctccatatctcacagagctaggccttttctgttttctctctgatacgctgtcagccatcacacatagcatagaaaaaggatacatcagattgccttgctaacaccccccaaattctgaattccaaagcacatctggctgaaataaagcagaagagtgggtcccaaagtgtgttccatggcagacaactacgttaatagatgttaaatgggttctgggccaaaataagttatgaaaattaagcatctttcattattgctgagacctttctaaacactgtgaaaaaaacactgttccttaaatttagatccagcacctatcccctgtatctcccagacttcatgtactatggaacctactttgagaatcagtaaaatcattttgcctgacacctctatgtaggtgacagcttggagtctttcaaaggcagggccatgctttatctcttcccagtgcctagcaaaaggacctgacacacagttgatgctcaaaaatgtttgttgcatatggcctggaatgttgtatgtttaactgagggcggaagtgcttgggattgggtgaagccacgcaactctgccaggccagcactgcagatggcttaggaacagggaggattctgactgcccaaaatgacatggagaatagggaagttgataaagctcatccttcacatgccgtcaccctccctttgagcagcaccctccttgtcatcatcccctgttctgtccccaccttcccagtgtccactcccagctgatttggctgtcagtttctgctcgtcgaagtgctaagccgatgagacttagcctcatccagccacatttcccttagatggttcctgctgactaaaacctttccggcctcaaaggagaagagctcaggtggtggaaggccgggaggcagggtttattctgagtaggacctgcccatgataccctcacatcatctctcactctacccacttgtgaggctggccttaatcatatgccaaagccatgggttctgtctctccacccgaaggggacagtcagggggcctctcaggtcagcactcagaaaggagcaggaaaaggctattgggctggagacatcaggaaaggacaaacccaacttaaaatacctagtaatggaggggaaaaagataacaatcagaacttaaatccagctcccatggaccaggtttaaaaagtctgtcttgaaagattttttgcagcatcactttacttttagtttttctgtctgaggtgcattcctttttccaaattgattacatgttacagaatgacaaaactccataaaggtacaagtggaatttcctccttttccaatgtcccttttctgttttaaaaagaggagcaaagtcaggaaatgccacagtgaaattttgcagctgagccaatacgagttttaaataagtccagctggaggggctctcaccctacacctctgctctaagccagtggggatgggcccgagaggaatcccccatatagccctgtgctctgaaaaagaagagccattctctgggcttgtcctggtctaacctgctactccagctggatgagtggccatgagccaggagctttagaaccagcagaagcctctccattgagcttgtgggatgaggacacagagccagaggccttacatttggcatagaagcccctcgctgggtgctgacatggtgcttggctaccatgggacaaataatgataatgtgtgtagcctcatattacttcaggtcaggtttgacctccaagcaattccagctccagtcagatttggcatgaaatgaattatgaaacacttttggttttcaggactgtttggatttctgaactacagataacagcttgtggacttacactactatttccattgtacagatgaataaattgagtatcagaagagttagggaatttgccttggtgcatacagctgagatctgaacccaaatcggcctagattcagagcccatgtttttttcgcgatgtcctatatcctgttacctcttgaccacactgaggtcctctactctcctgtgtttgctgagcagcccctgtagctggaggttgtcctagagctataaaacgaggtgtgtggattagagaatcccttcctatggtaataggaaggtccctcataatgatatgaggtcccttcccaacctcatttccataatgctatgcaaacatgtattatactctctaagatgggctcacagctgtgtggacacctcggaagagagatatgaccctttaaggatctcttgcaaaatgtaggaccttggtgccttttggaccaagtggcatatatgatccccgatccctctgcacgttgatgacactgttctggctgtagcgtaggtggtcttaactgagacacatgcctggggctggttaatgctgccgctgctgggggaaataagaaagacactaattacactaaggctcttatttctcttttactggggagttggggcagggcagtaaggagagagggttgtcctttaaattagagcatgtgtaggtataaatctttctcccatctatctttattttggagtgtgtttaaggttacgcattatatgcattcctctccctatatacctctatgcttatatcaattcataaataaaatatacagctgctcagctgaaatgtatcacttgtctgcaagattcctcctgcaggttaacatctcctgccaggggagctgccccggttttcagtgactttcaatgacctacttgtatgcattggttcaggcagggcttaataagtggcctggcagatacgtgcgtctgcatgtattcttcattctttattttagtattatatggctttcttcagccaaaaatcaatattgtgtacataaagttagctttgcaatcataccttttcctatgaaacctgatatgaacagaaatttttggaaatggctgggcaggagagactaattcatactgtttatcattccatggctgttttgatattgtcataattggcattttccctataattgccctcagtattgccagtacttataggaaagaggactttcaaaatgaaatacacctgaggactgggtattattgtggaagttcactttctgttgaatatgatctgggattgagtttggagactgaattttagcatgttactgtcaatcacagcttatctgggtcttatttggcctggaattggaaattcttgaataacgtgacactcaagcattgggtagtctcagagtcaaaagctggtttaatcactatgatcagattttaaaataagaatactacagtatttactaatactgaagaatcccatcttttagcaaaagtcaatgttttgaatgtctctgtaacccttgcagaaagtattcattgttaaaaccaagcattgaattaggaaccagcgttaaaaaaataaatctcatacacatctataaaaacaaatagaacaaatacaatgagataataaaaaataaattcatgtaaaattttgtagaatatactgagccctaagtcaagcacttggtgcactgagaataattctttttcttataaagtaaattacaaaaagttggataaaaaaatcaatggactattatttaggttccatttaatctaggtgctttaataatgtctttctggccaaatacagtattgattttttattgttgtgggattcacttaacctcaaataaaactaaacgaaactaaacccaaatcgcctactctttcttgcaattgttgtttacagcacgaaagcacacactgaatttaggcaactgagggaggaagggggagcggtttaggagccttggtttctgtctgctttcaactgacagcaacacctttagtagggcaaagctaaagtccttacagtgcattttcaaatcttgacaaggcaaggcactcaatacgtatgcaacaaggcagcatagaaatctattaaaagagcctgcttcagacaaaatgagaagttccagtttctattttacattaacttggtgaggaaatcaactggatcctaaattagctatccaaataatgcaagaaaatacatttatagacaaaggagggcctggaggggtagagggtaggcagtggcaaccactaggggtttgagccagctccctctgataggccttgtgtatgataacttctaataattgccccttttaaatcttacttccactgaaattcccaagtcagtgttgccattttgcagatgaaagaactgagtggttaaattacttgcttaaggtcacacagctcaggactgggattccaaccttgatgtgtcaacatgcaggttctttctacacatagcccaggcaataaataggattatgtgtaaaataacattatcatgaggattaatatttataatttcaattaatgcttatgacacaaaatttttatctgcaaaatgaagagcctgatcagaagatcactgagggtcctaaatgatcttatttaatgatttggcattagtgatttagaaaaagctgatgttacctctggcatgcccatgagctgaatctggtttgcagattagttttgtttttcctgcctgatgtttaagattgttttgacaaaaagttaaaataaacaggagagtttatgtaaaaatctgacttccagtttttcctgacagatcaactgagactgcactcttaaaaggtaagagtgagttctgagtagcaacaattcactttagatgtctgcaattctcccctttgccatggttcccattaatccttactacactctgttacttgtttcttttctctttctcaaagttatttgcatgacttccttgccctgtaggcattttgaggtggctttcctgatgcagacagcagtaaaagctactagaagagacttgcattcaagaacgtgccgttccagtaatcaggtctatgatcttgggctagcgcattaaccactctgaacctgattcctcttttgttattaatacatgggaacaagaatggtgtggagatgattaaatagtccatgaggttatactcagtagatgttaactgactctgagacattcttagaaaaacatttcttaaagaaaggttgcccctatcacgaacccacagaggatgtcattaactgacaatgagccttcaacctctcatatccatcctcatagctaacctttatcatcacctacaccctcttgtaggtcatttctcccttctttccttccctctctttcacttggctgagtgacttttaattgtgctttcagaccatttccaatatacctgtaattacatggcaacatcttttcataatacacagtggaacaagtgagcagaagtatgcaaagtctccttgctctccccttaacagcctttcacacagctgctcatggcacccctccctttcagaaatgaggcccccatactttctggtattgtggatctttcctgcttccttttcttatcactcctgtttaaagtgcctgcaatagttaataatgtggcattgcccatcagagctggataacttttttcttgaattaattattttggtaaggattcttaacaggaggcctaccctcttcacaaatcttaagtgcataataatagtattgttaactgtagacacaatgatgaatgatgagtagatttcctagatactattcatcttgtgtaactgaagctatgccaattaaatagcaacttcccatttctccctccctagcctctggaaaccactattctctctttttctgtgagtttaattattttggatacctcatgtaagtggaaccatgcagtatttgtccttttgtgactggcttatatgacttagtgtaatgtgctccacgttcattcttgttgccccatatgggaagatattcttcttttttaaggctgaataatattgcattgtatgtatatgcctcattttctttatccattgatccactgatggacacagctcaattttatgctttggctattgtgaataatgctgcaatgaacatgggatgcaaatatcttttggaaattctgctttcaattcttttgggtatatacccagaagtgggattgctagatcatatggtagttctgttttccatagcatccgcaccattttacattctcaccaacactgtacaagggttacaatttttccacattcttaccaacactggttatctttctctcttttttataatagccatcctacctgctgtgaggtgatatcttattgtggttttgatatgactttccctgattattagtgatgttgagcattttttttatatacctgttggtcatctgtacgtcttcttcagagaaatatcaagtcctttgcccatttttaaattgggtgttttttggctattgagttgtaggagttccttatatattttgtatatttgccctttatcagatacatagtttgcaaatattttcttccattctacaggttgtcttttccctctgattgtttcctttacatgcagaagcctttgactgtgatatagtcccacttgcctatttttacttttgttgcttttacttctggtgtcatatccaagaaatcactctctaaacaaatgtcatgaaaatatctccctatattttttcctaggagttttacagtttcaggtctgaatttaaatctttattttgagttgattttgcgtgtgtgtgtggtgtagggatctgacttcattgtttcacttgtggatataaagctttccccagtgctattcattaaagagtgtcttcttttccccattgtgggttttggcacaattgtcagagattagttgactgtatatacatggttttcttgtgtgaaaacatataggccaacggagcagaagctctctattttggtccatttgtttgtctatttttatgccagcatcatactgtcttaattgctctagctttgtagtataatttgaaatcagaaagtgtgatgtctccagtttttttctttttcctccagatagctttggctattcttggtcttttgtggttccatatgaattttgggattgccttttctatttttgtaaaaaatgccgttggaattttactttgctagtatggacatattagcaatattaagtcttctaattcatgaacacagcatgtgtttccatttgtgtcttttaatttctttcatcaacgttttatagttttcaatgtataaatctttcacctgcttgtttaagtttatgcctaagtattttttgatgccattataaatgaaattaattttctttttgtctattttgttgtcgtatagaaacacaactgatttttatatcctgtaactttattgaattccttcttgactttaagagtcagccatgattgtgatgtatgtgcctggaaanagcagtgggagtagaccttggaatcctagtagtgacaagtaaatggtaaccgttgggttggatgcaggtttgcaaggaatctcaggcctaacttaacctcaaacaagagggaaaaaaatcacccatggaggcccttacagaaaaactgagttgcattttgtcaaggcaaagaatggcttttttattgcatgaatgagaaaggctaagacaagatttttactttccctgttgagttctacattaggtttagccatttggaactagtggaagggcttccccccacgttgatgttcaggttagccactgtgtatccattccgtggatgaagatggtgattgggaattgggtgtttagaggttgtactggggcacacagacagggaaggaagcccatatagatctgcaacctagcccatgtagaacctcaaccaggtgtccatctctgcctatgactgagtgagccagtgaccgttttgttctccttgttggatcatagtccagagccttgatgcatttagtggcatgaacacaagctcttactggggaggatgtggctcactagtactatcttcatttcccaagtctgaggtgtggcaaatacattccctagtcttctaaaaaccaaagctcaaggctgctcagtagggcattggcaatgctagacctgctgccttggaacagatgctgctggttaagaatagatttctaagtgtttcaggatgctcaagtatagctgaactatttcacttttcatggctggtctattcttatactttgagagcagcttccacagtgaagtgagaacacagaacataacagcacaggacctttcccaaagacaaagaagattattgagttaggcatccctggggctttgagtaggcagatctcttatgaaagcttgctctgggatttctggaatccaatcattctagatagtatgtgtcttaaactttttaccttttctgctggagggaaaagaatgtaggtgtacaggctatggaacaaatcctgaggccaccattgagtttgtgatcttattcaagtcatttcatcttcctgggtcttagtttcctcacttctcagagatcattgtattaaatgcagtgatgggtgaacaaggtatgtacgcctgtattattgtatgctcggttcctggcatacagtgggtgctcaagaaatgtcagttctcctttctctttctgatgttcacatttttactgcccaagcaggaagtgggttgaaaatgtggaaagagcatttaaaattttatctgttagccatcatttactttcttcttcccagaacattacagctctttcctaaagggtaaaaaaaaaggccctaagaagattaaaaccagcatgtaaatttcagcttagttcaaagctaagccccttaagaaacctttatttgcagagcagctctgtataggagctctgagcaagcgcagggccatctggggctgcttgctttaatggactggttctcaaactggcaaccatcagattcacttggagagcttgttaaaaagcttgttggggggacctacacattttttttttttttgagttggagtcttgctctgtcgcccaggttggagtgcagtggtgttttcttggctcactgcaacctccgcctcctgggttcatgccattctcctgcctcagcctccccagtagctgggactacaggtgcctgccacctcatctggctaattttttgtatttttagtagagatggggtttcaccgtgttagccaggatggtctcgatctcctgacctcttgatccgcctgccttggcctcccaaagtgctgggattacaggcgtgagccaccacgtcctgccacacatttttattccttacaagtttccagatgatacaaagctcctggttatgggcccatactttggaaccactgcttagtgggaggaggcatgcaggcagttgggacccctgggttctgagccttatcctggctttaaagagctagatgacctcaggtaggtcacttaaactttagaagacacagtttctcttttgtccaacaattggcaaaatgtatgatttggaaaaagcataatttagagcagagatcgctaatcttttctctatagtgggtggccatcccagactctatgtgagggctgaggggaacaaatgtcttggcacttgtagcccatttggaatgtttggcacacaggttgagaaagtctgactgagtggttaaaagcgtgtgcttttaagtcctggaagcattagtgtaagtcctcactttgcctctccaggtggtattttagctgtttcacctaggtctgagcctcagtttggtcatgtgtgaaaagggacagagtatttgcacctctatcatagggttgtggtgaatatcaagagagaatgcatgtagagcacttgacatgcatattaattcttattagctgtttttatttctacttctaaaattctgtgatttgccctcctgcccattgctgcacctcattggaagaagcagataaacctcttcagtgtttggaaatgtataaacttttttagggggagtgaggagtgctttaaaggagtgcttctcaatgtttaaaatgcattcagatgcctggggatgttgttataataaaatgcagattctgattcagtaggcctggggtggggcctgagattctgcatttctaagcagctctcaggtgatgcctatgctcctgatccacagagctatgctatgagtaaggctatgctttgagcaatggctcttaaactctattgtacatcagaatctttggagggaacttttaaaagcccggagtctgatttggtacagggtgaggcctgagcatcaggttttttaaaagtttctcagcagccaagttggagtaccactctttaaagcactctttagtaaaacacagggaaaagttgaattgatttgtgttccagaagctggaagtaattaatttcccttcaaataggtccccttttccctaggagatttgcagattttcactgaactatggccaaaataagaaccttttaaacctttattttaaaggcaaaaacctgtttaacatctgcattcaggaagctgtgtggtccagtagctcagaaataggcccaggagaaacagcattcagcccctaatcctcaccactaccaccttcaccatgaccttgggaaatcttttcatgtgtatgtttccatattttctcatttgcaaaacttggctaatcctgcagaatggccacaggatgtgtgtatggtcagatgcagctttaaaatcactcctgctgcccatctcccaaattgttctgatttgcttactaaattttgacatttgcgcaaaatgcatactttgtaagtcttggaagttggtaatattcaaactatagtcttctatctctctccctcttttaatagtaccaactgcttcctcttctattcacacatagtttaagtttaatgcaccccagagctgcagagaaatcagcaagagggcggaaatgattttttaaaagctgtggcacgaagattggccttgcaggattagcctttttcttggccctctagtggaaaagtccacctatacttgagggtggaggtcatgcagacaaaaagccttcagtaggcaagagtagaatggaatagctgggtgttagggccatcctctgcagaagatgagacagacgcattctccagcagcagtccttaaatgttggtgtgtatcagaatcacctggggatctagtggagcccacagtgactcaggcctttgaagtagtatagggcacagtccctgtgtttttgcagcttcccctagtgattctgacactgaccaaagtgtgagaaccactgtcctagagtgttccgctttcccttggtgtttttcagttagtgtcttcccaaccacatttctaagcccacccaaagctgaaaagctttctttttctggtgtgcaaaatactagttgtatatgttaattttcaagccactcttaatgtcagtggaggtgttttttatgaaaccaggaggggccaacccttgcagaactgcagagtggaaataaaagaggttcagaatcctcattatctcaacttgtcctccttcaccctaggaagagtgagagggctggggagagaggtgttgctagctgctggcctggtatatcttacctggcacctctgctaggggctttaagacagtgttgtcccacctttgtcacagcgggccaggaatcttttgcaactctggattgtgatgcagaggatgaggagcacgttgccttgagcattaaagctatggtgggtgggggatgctggaggcatcagcccccatttcctctggatgattgccctagtatatacaggcaataggcttatacatcttttcttcactagcactcagcatactgcccagaatacagtaggtgcttaatgaatgcttgtctaaaaagatggaaaatcgggtagcagagaagaaccaaaagatgccagaaaatagaaagaaaaaaacattgaaggtgaaaatgaggtgtttgtattaataaatattaagaggaatgaattaaagggctgaaaaagcccaagaaaggagatgcaggaaaggctgggagtcctgaatgaggtttgtgtggagtggcggggaggaggagagagcccctgaaacagccagataagaaggaaaaatagcaggagggaaggaaataagagcagtgatggagggacagaggaaagcagtaaagagccaggaagatggcgagagggagagctggcagaaaggacagatcctccaaccagccagcaggtttggtcttattccttactgggaacagacagaatgactgcgtttgacgaggagtgactcaggctcaagacaggcagaactggaggataaagccagatgggtacaagtgaagtgggtcactgtcaagaatcatcacgttttctggaattcgatgttttcaaattgcataatcctccttgttctcaattatcctccacaagagtgtggagtccctcccacgttacaagtccatctcagttaagccccagacatgcacttctaacaccacggagggcttcttggcagccttccctgcccgccctctccacatcctgcccttcccctgcagagggacaactggctctccaggcatttcccttccggacttccagtgtgacacacacgctctggctgctttcctgtccccaaagactcttactcctccagggccactgccagcctagtcacagcctttgtacaaattagagaggcccacctggatcatgggcagatgagaacaaggcacagtctgagactcaaagaagtagctgtgtgtttgtgttggggctggggaggggtgtgtagaggagtgttcagggaaagtttcaaatagaaagggatatctgaactgagtttccaaaggggaacaaatgtttttcctgttccaggtgggtttttttctttttcttttctttttttttttttgagggaaggagggaaggaggcaaggcctcttgggggctggaacagcatgtgcaaaggagcagaggtgtgaaacagcatgctatccaatattgctggtgtgttcttgcatgagaggcagcaagaggaggactaagtgatgagaatgaggttagactaggtaggaagaggccaggtgtctggttttaagcaagggaaagacacagtgagacttgcatttgaggatgattactttggaaagatattatttgctttttacatatgagcatactaaacctcagagaggtatttataagtgacctgcttcatgtgacacacttaatagcggaactagaacttgactccaccttgtgctaaaccagggtctccttacctacacttcaggtctggatgacctctgagatttcccttgcaaaacttgccaggcccatttgactcctcccaaaagccaaaaaagacttagattcaggccggcagaggcactgcccttggtcccctaaaaagatgacttaaaacatctgttttctccatttcttaacagaggaactttattcattccaggttagtctttagaaagcaaaaccaaaatactccactggacatttactggcacagatttccagaaaacatatatatactgaatgggggaaagaggattaagaggtctcttagacctttgtgggaagatggcaactagagtcacttgttagtcacccactggaatggtggataagtcaaattgtatccattgttttgggtctcttcctgccacataacttcataataggtctgcttatgataaaaatgcaattatttcagtatttctcctttttctgcctctcatacataggtgagatttctcctagatagatggcctcagggagaagagaggtgaaaagagccattaaaatccaaactctggttgtctgagccatccaagaaacacccacgttaatggctgtgcctaggaggcgcatatgtttgactccagaagcaacaaacattcttggttagatcatgggatgtattcccctgttaagacaagggaactgagtagaggaatccaaagcctcttgttaagtttgagttttacaagagaggcactttggaataagaggggatgttattgccttgttcagacatggcttcatcttggcagcattcaggccttgggttaagaacttggtttcgagttgacagacttgataaaagtccagccatggctggctcataaacgagacacccaagatctatcttcagaaaagccaatatatttctattatcactgctgataaggctgattctctttgaagtttaataatgactcttccaaaaatgttccctcagacattcaaaatccatcttgtattagtttttctaaaggctggtttaacaccctcccatttcctattacgacttaagtccagtggtattaaatgcttcagtcttgacacatggctctgtttacctgcaagcccaggtgatgagcaccaccacccttagggctcagcacccctatacacttttctgcagcctagctcctcctgctggtgtttataactcagggtcaacaattaatttgggtctatgaataataactctggagagtacttttatattctgatatctgaacgtgaaccagatatcaacattattattaatttctgggattgagaaaatgattcccttccatctactaagggagtgataaggcaaaatcacaacttctatatcaatatctgtttgctcaagaatcttaaatgccaactgatatggggcatctgggtaggctgagaaagggagggttgagggcaacttttcgagaagctgtattaagcatttcttcgttatgttctagcaggtgactcgtgttccctcctcttaaccccctcactgaatcgcagtcacttggttagatcagctgctgctgatgggaatggacatgctgagtgctaagcccttgatgttcgctaccacattcattctccttgacagtgatagaaggtagatgataccgtttcatagctgaggaacaggcacagagaaggaaatgtcccagagtcacacagttcataagtggtggcaactaggacttgaggatttgaactaggtctctctgaccttaaagtcccaaaggcaatattgttgctttgttaaaaattcacaaccactggggtttcaacgtctttatacagggatgctgtgctggaagtgagttgacaggaagagagagtctacagaagaggctgcctatgaaaacacaaatactatcatgtggaatggtctcaaggaagtcttttggcagatttgacagatctgtttaatgaagatcaattctatttaaagcccctcaccaaaactaactgcccatcacctcattaaaaaagaaatgactgaagataacaaggggtgtgtctttggccagaagtgggctggctggaaacacggcttgagttacagaactgtctcctcagcttctttcctggcttgtctcaatttctcagctgtcaagtgatggaaaagaatgcttgctattcatcaaatttgtatttatttgccaatggacaaaacggtctaacaatttccttgcgggatattctaattgacagtttaagcagattatgaacatttgattttttcccccttgtatgacctgaaaaatcataaaaatggaatttctttaaaaaaaaaaccctctaaaatgtgagactgacaaatatgaacattattctccttatcgttctaatctaacctttcttcctggactggtacaatgctaatgcaccatcagggaggcagtggggaacataatgggggcactggacaggaaagcagaggtttgttggcagaaggttgaggcctccccagaggacctggccctttctgcccttattctcaaatccacacaccttcctgccaccacaggctcgcctcatagaaagcactgaaagccagggcagatgcctgtactgtgaacctgtctgctttcagttttccacctactgtctcaaccaaaggtaacatttgaatctatcctctagaactgctgggagaattaaatgagataatgcatgcaaagtgttaagtactgtgcctggcatgtagtaagcacttgagtttattcttatatctttaaaaacatgtcttgcctgtaagctccatgaaggctaggacaatgttctttttgatgaatcaccagggcctggcacagtgataggtacatgacacaagctcaataaatgcctgttaaacaaatacataaaacctgacccaggtcagcagcacctcctgcttggaatcctgccatcacctgatctccccgcttgccctcttgtccctcaacacattctccacatttcagtcagagtgatggttctaaaaaatagatatgcctatggcttccttagcagaaaatgcaactctagaatatggcaaactcactcctacactctctggtattttctcttctcagccccgtctttccctgttctaggcttttctcaaacatgcttttctcttctttctttcctcctggcctgtacacatgctatttccttactgtagtttgtatatgcatccttcaggtctcagtgaaaatctcactttctcagggaggtcctccccactctctgtccgagacacattgctctgtttttctctctgtgtccttgtctatgaaacttatggtgccatagtttgtctgttctttctaatagagggttagctcagtgattgcctggtttaggctctgcagagaagatgatgtacaactcatcccaatactgtattcggtgcctctatgttggcagattgatattagctatgggggcaatgtttataccatggaaactggcatatgctacaaagcagttcttactttttctccaaatagatggttgttaaacacttaccagcacaccactggttaatcccatgagagcaggaggtatctctaatctgtcccacagtgactggcttataatagacctctgtaaatatttatggatttaaacagaaattgacatggccatactgaattctgcacatatgatctcttgacaatgatcttaatgcaattcttatttttcaaatgagtacatttaggctcgcaaagtgtagtaacttgcctaggtcacagagtaagctgtagatgccttgagcctgcaggctgggtctttgcctctgcctattgctttctgctgttgtctgtctgcaccacattttctctagcctggcttcggtctctgaataggccctgcagcctttctgttcccaggctgactggtccctctggcctctgttcatggtcatcagcattgcaatgatagccagttggctgcttacccactttcttcctgcatcaaggtctccagcctgacctctgggccagccctgcctttaaggcacctacatgcaacccactagatacaggacatggaaaacagataagactaagaagcctccagccccatgcctgtgactcagcagtaggctaaccaaatcaacccagtttgctaggaactttcctgactttaccactgaaaggggattcccaggattctctacaatcctggaaaaacctggatggttgatcactctactttgccatgtgacccatgagcacacaggcatgaggccatcagaagaagggaaatcccaaaggggttttgaaaccacagcatccacttaaccactatggtagctgagcagtgtgtctgcctccaccttcaccctgaccactgattctgtttctgtatctccattttggtgagtggctgggaccaagaatgagcaatttaactttctaggcctctattgacacgtatataaaatggagatgagaatcagctacataatttataggggtcagtgaaaaatgaaaatggggaccccttgtttaaaaattaaggatttcagccaggcgtggtggctcacgcctgtaatcctagcactttgggaggccgaggcgggcggatcacgaggccaggagatcgagaccatcctggctaacacggtgaaaccccgtctctactaaaaatacaaaaaattagccgggcatggtggcgggcacctgtagtcccagctacttgggaggctgaggcaggagaatggcatgaacccaggaggtggagcttgcagtgagccgagatcgcaccactgcactccagcctgggcgacagagcgagactctgtctcaaaaaaaaaaaaattaaggatttcaagatggtggccacagagcattaaactaagcatggggcccttctgaatgggggtctctaggtaactgctcaagactcatgactgtgaagctcgccatggtgataataatacccataattgagttctgggggttaaatggccaaatcatcaatagcactgagcacagtgcctggcccagggtaaacgttcagtatactggtggtggggattatttctgaggtttggcctggcttcccctggcttgcttggcctcttccagaaagacacctgaatttttactttgacactgaagtgtatctggtgatcttttgtaagtcacttcagcttctcttaggctcagttttccccccataaaacatggagattgcaggaaatctctaaagagcttaccagctctaagtctatttcagccaactccgtgacatttatacacatgagcaaggtcttcatgttcttttcaaagcagcttcttcctccctaggcttgctaagattctatttggacctcaagttccattcatatcaaagagtctctacttccaaccctaaatacataaatcaaggattcttagattatttctaaagttcctctaattcaaaggtaaaccctccttacacatgaacagtctgaggcttgggaaggtggaatgacttgcctagggtcatataatgggataggcagatggtaggaatcaaagccaggtcctccacagtattacattatttctttcttggctaaggaaacaccacagcgtacctttatgattgtgctttgcaattattctttgagtaatttatcataaaaataaacagaaaagcaaaaaaaaaaaaaaaaaggttcatttggggtcaccagatgatttttttccaagtatgtctccatttttctcaaaccctggacacctgactcaggcttggtttcatgatttctcagtagtttttatttagcaaggataagggtttcctctcttcctagttgagtgtaggatttccagaccctttcttctcatgtttctgtactctagggtgaattcgcagatgttcctttaaaggggcattttcttaaccttttgtttccctgtatctcaagtggtcttgtggggatatctagtcattcccttaaaagaaaaggttggaaagaaggaagaaatgttctcagcaattccctgggtctggtccacgtgaattcccactaggtctctccatggggcatctggttatgtgcctggtggttggaaattttgagcttttcccaagggtgagagtgagagggaaaaaaaaagtctctgtcccatgaaatcctgttgcttcctaaaaaccaccctcgtctatgttgctgttttcactcatggagctctgactgggcaatggatctggctcactttttaagtgatttattttttaatttaagtttgcacttttcacatgaactggctcaggaccagccaaaacatgtgttgcttacttgggagtaagactgtgattttataatttttaggcttgctcttagtttaagccagccttctcctgctgcagtgctgctgaactgacagaggctgtagagtcaactggaaaggattttctggggctcccctcatcattcattggcatctagagcaacatgccattttctccattttcaagcagctaaaaaggaagactaaaggctcacatttgaaaggactacgattttccaactagtttgagcctgcctgcaagtgagctttgtaaactaagaacagtttccagtgcacactttcttccttctccataaggctgggtaataatctcctttctagaagaaagtcacgtaaatctggggctgctatgaattttcaactggtgtcagaccaacatgagagctaaagtgcacaaagcgaaatgcaggcgtggtgtggtctttacaaaacaaaaccagaaagtcttctatcaaaaaaaaaaaaaaaagcccgaatttagaatctaagtttgtacgaattttagaaatggagactttctgcttcctgcccactttcctacacaagagaggcactctacttgtagaacttttgaacaatcattgaataggatgtgtaggtagatggagcatacactagaaggactaagaaaatatcctgtgtgtgcagagagggcagtgatgagaactgccgtaaccagaaaagattatgtttatggggcctctcccatgctcatgagattatattaacactaataagcacaggtggtcataatttttgtgaacagagaatcagaaggaaaatttaagttctagaaagatattctgggtctaaaatcattcatagctaagagtcaaactggattgtttatttgggaggatgtctgaagtcctcaggcctctcattttggaggtcaggaagtaggcgcccagaaaggtcaagttacccaaggttgcaaaagggaagaactctgtaaacaacttgatttccagggaacctttcccatccacgtcaaccaagactaaaactggcttctcagcccacacagtcaatgggagatagtggtcttttctttaaaagcaagtccattgtgtatcagttggcccttgctcaatggctcttgacttgtctaccacgaccaggactcctcttagctgcccagcatctctctattgggtaagagtgtttatactttagcaataaaggaaggatttgtataggatttcacagttggccagacttttcatacacatcattctcatgtgtcccaaacatctgttttgtgaggtatgtggttcccattttaacagataaggaatgacttaagggcatacaattaagtggcagatgtggggcctgaacccagcattcttattccaattcaaaattctttttgcaacatgataatgcaagttgtccaggacatgagaaattcttctctaggagccaggtaaaagcagctttccttcctgggcaggttgggtgcttctactctaagtaactacactttttatcttacagaacaaaacagcagtaatggggagaattaggaccaggtacagttgtattagaagcaggtgatatgtcaggtctcattacataaaataacaatattgtgaaaacgtctctcctctctgtaagggcatgttttctcaagatgcacatctaattatggtgacaagggcggggagaagaactatgttctgaatgttcttttgtctctgtgtgtgattctcacatactttgctctcatgtgtactgaaatcaacctgagcattatgagaatgaaaagtgaggactgttattccatattttagtttctctgagaacttcctaaggtcagccttagaaaatattttgaaaatccattacacttccctatccaatggggaaaagattaaatgggttagatttttgtgagatagaaacattctatttgtctattagacagagaaacaaagcattaagctcagatttttatggagaacaaaacctggatgctgagaattttgtctgttacatcttttttaagttacagggattcaaaacactgcaggaaaataatcagttgccctctcacactgtcagaggatatggcataacctacttctgtcatttactgaacaagaactggtgtgtgaggtggaaggttaaaaatgtattgccacaaggctcaatccaatagcaagtcaaaaggagtaggaataaactttggtggaaaaacaagtggtttttaaatggttgaccctcaattgcaatgtcacaaaagcacctctaccaaaggtctggccttgctattaatgcaagcatgagcacttatatggaaagagcttggtctgctcaaacattaatctttgactatctctgaacctgtcccagaggagagaaggaggtgagctgcttgatgacatacgccagagcagtgggcatggcccttccaagtgggacactggcttaccaggccagagggtgagatgggatccagtgaagccatctgttccatcatcctgcttttctttctagtagctgaaaacttaccctgctttacacagctgacagagaagtaattttctacaccttccttcaggcaactctctcctagggtagcatccccagccttctcattttcaaagctgagtccctcatgtcacagtgtttggccaccacctgttcatccttcagcacagctgatcactattttctaatcatgtcagtcatttgaggaccgaagtcatccccaggttttgtctcttatacctctgaccattgcttaggccaagatggcataccagctctaaccctcgctttacgtcgccaatgtaaatttcccaatcttccatccccaagaacatactcttctttagatagacactttctctcctttcaaatatcctccttcaggtcactctttgggcaagaaagctaactaattcctcctaggagaccttgaagctataatattacacgagaacagaacataggctgaggaagttaaaaaaaactcaacaaaagtacctataattaatttatctttactgtggaaaacaagtaccatgccagggactcccactcataccatcaaattaaccctcatggagtccttcaaggtaggtttggctgtggccacttccgtggttgttgtagagcctgagtctgctgtgggtggaggaactgcagttcagtgtcttgcagattctaaagctgtgctcagacacataggcacctcacagagggcagggacccggtgatgggaagagttgcatgctgcagattgaatcatgtccctgccttattttgctgatattttttattcttctatagccataggaacatagctctacaggtaattcacaaaacatacccaggaccagccagttttgggactggcagagtcatctaagttacagccctgctctttcctggcagccacaatggccagaaacaactccttaccccacccaatcccatcacctcctgacagcctttttggtcataagatttctttatgatcccttgccagaatatcaacagttctatttgctccctgaatcctccctaaatattccaagtcttatttccattctgcatatagaaataccatgtcccgagagcggtggaggactgaaagttcacaatcttttgacctcttggctttggaaaacactcaggtctccctgcttccaccattctggctagaggccaggcagcatcttcctctctgcctagatgctgctggggaatggccctggttggggtgacggctttgcaaatgggcctgccactcattggaagcacagagcagggaggctgacggggagtatatttcacctcaatttcacaatgggcagaactcatttctaggaagtgatcaggccaggtgcaggcatggctgcccatgccccccatagctgcctctctgtgggactgcggatgtgagggcatgggcggggtggagagggagttcagcaaccctcctctgggctcccactgtgcctgtgcccacctgcatcctacttaactctctgtattgtgattttaagcctctgtctcccccattggactgtgggatccatgagaatagggtctacattttctcttttccatctctagcagatggcactttgctagcacattactaactgttcagtaaatgtgtattggaccagtggaaggaaaaacattaataccttatgtggatcacgttccttgctgctaggatcacaaactgctgtatctcatcaaatgtcagggtcctgtgctccttcgaagctctgggagcatataggactggcagatattacaaattctggtggcaagaggatctctgctatattgtnggtgcttcccagaagagttggttacaaccagcaaatgatattctatgcagtgaattgccttgtgggatatacctttaggttggcactgacaatgatgtatcacaatgatgttaagaagataccttcttggccccatatcaggcacgtaaatatgaaataatgcaccctgggcattggataaactctgaccttctgacatggtccaaaaatacaactctggggaaaactaggcctgctgggaatcaggaggatataatcagggaatgtgatgaactactgtaccnnnnnnnnnnnnnnnnnnnnnnnnnnnnnnnnnnnnnnnnnnnnnnnnnnnnnnnnnnnnnnnnnnnnnnnnnnnnnnnnnnnnnnnnnnnnnnnnnnnnnnnnnnnnnnnnnnnnnnnnnnnnnnnnnnnnnnnnnnnnnnnnnnnnnnnnnnnnnnnnnnnnnnnnnnnnnnnnnnnnnnnnnnnnnnnnnnnnnnnnnnnnnnnggattgtgtgagtgacacagaacagctgttccacatgaaaattgattagcaagtatcgctacaaatgaactcagaatttaaaacaaagctccatggaaacgaatcattctaaatcattctaaactggctgaagtaaagaagtttctccagctgatgactaaaaagttctcctttggccctgcctctccccactggccagccctcttcgaggttacacagtagagatgggatgaatcccaattcttccctgctagctgcttgtcacgaattttaactggccccaggcaaatgccctggcactgtctgcaaagctggaggtaaaaatatcaccggagacagaggcagctgggttagcctggctctgctttggggcaagagccacactcttggtgattaacctcagagcctcccttgagcctcttagaattggtccatcactgcactcaatagtgagtaactgatgggctgctggacagtgctctatctattagccctgcaacacctgggaagttaaaacataaaatactgtttggtttttgaaatggtctcattagagagttgagtctaattcacagaaacaaataaccctaaggtgtgatactcaaggaaattacagaatccttaatggcatacaattgggcagtctgagaacatctgatacaggaagtaaaccaaacaaagaacatcagtttttgaggataaatttaaagtacctcagctataagccccagtaaagacaagttgtagtatatcttctggtcatctaactaatggaagtcacattttattcccattatactggacacacattagcaagctctgatctctctaaaattagatctttgcagagatagagttggctcatcctgacagggctgatgggtggtgagggctctaacggcaacatgttccatctgggcagatattgttcagctcagctttataaagtgttctttgtgcttcaagagttgatgtactactatgtggcatgaccaaacaaaactcagtggcctacttatttttccacttctgcttcccacacagaataagtccgtagctggtcctagccaaacatccctaccctcccaacaagaactggaagatgccatttagtcactttcctacatttaaaaacatgtgtcaagatcatggctcaggaaccatagataatcaagacccagggggttgtatgttctttggtcaaagagattgaatgatactcactcagaggctgtaccaattttaggtttttacattatcttctttaattggaagaactccccacttgggcagagttaaaataaacccaatgtttaatgcttccctggggtaaagctaaaatgtgtattaattgtggaatggtggcacgaacacaatcccatggccctatgctgtgaagagcagagaaagaaacatggcctgatctggagagaaagttctccaaatgtcagctgggaaggatctttagctggtgaaaagaggaagcagagcggggagatggtgacaccaaagtcctcttgcccaaagttacatctataaggttctgtgataatgtgtctggatttctgagcagacaagttgtattatagttggctgacgcagccagaattgacggacattagggatggggagttggagggcttggaggttaagatgtgcagaagaaacggcccaggcagaaacatttcccacatctttagccattagaaaccacctgtcactcacgagataaatttggccccttgggcaaagggggttgctggatttctttcatttttgtcatgaatccatccaacatttaaaatatgtcaaggagtttgccatcagtgaagacacaagtgtaattacggcataatctctgccctcaaacttgctcctattttggggaagagagaaagtaaacaggcagcttcgatttcttgtgctcagtgtgctgagagggactggatgggaagctctgggagcatataggactggcagatattacaaatttggtggcaagaggatctctgctatattgtggtgcttcccagaagagttggttacaaccagcaaatgatattctatgcagtgaattgccttggggatatacctttaggttggcactgacaatgatgtatcacaatgatgttaagaagataccttcttggccccatatcaggcacgtaaatatgaaataatgcaccctgggcattggataaactctgaccttctgacatggtccaaaaatacaactctggggaaaactaggcctgctgggaatcaggaggatataatcagggaatgagaaggaaaaacatattgacaatattaagagcaaattcatactgagcacttaagacgttttaccagggttactgcatttgattctgtcaacaagcncaccgaggaaggagctattatttccatttcatagatgagtaactgaggctcagagaggtcaagtagcttgcacatgatcacacagatactatgtggtgggtgcaggagtcaatctcaattctgatcctagggttgcagtgaggattaaataagttaatactcccaaagtgctaggaacagggcctgaaatacagtcagcactcaataatcgttgaccatgattactaacacagacaaatctctgtcacagacctcctccaagagaaacaaatgatctcccctcaaagaaccaatctaatgtcatcccctcagtgattaaaaacactaattatctggctgaaaaggaggaaaaaaatgagccaagaacttgccagctccctctgtccaactagccatcaggtccaccaagaaatgagaacatggtcactatggccagggcagccctcctcagagacaagctcctgcccgaggagctactgctcctgcacaacagggcaacagccctcccaggagcccacaccaaaggagaactcctgcctcattgcccctcactttcctctcaggttggatgtctcagtgttactgagattaaaatactttccttagtcaaaatcctcctgattcccacagcagcaggagggtgtgaggtctttatgggggctgaaagatgagatttggtgaattacactttccacccttgtttttctcccccagaagatgtagatcctctggctacagggataagcagacacctgttttctttcttttaaagaaagcagtgtctgtctacaaatttccttatgtatttctcaggtttgaaatgttctatgttccattttcttttcttttgagacagagtctcgctctgtcacccaggctggagtgcagtggagtgatctcggctcaactgcaagctctgcctcccaggttcatgccattctcctgcttcagcctcccgagtagctgagactacaggcacccgccaccacgcctggctaattttttgtatttttagtagagacggggttcaccgtgttagccaggatggtctcgatctcctgacctcatgatctgcccaccttggcctcccaaagtgctgggattacaggcctgagccaccgtgcccggcctcattttcttccttctctccccatcccaatctgtttggaggcctttgcatcccaatgggatttctagtagattgttataaccaccagcagtggggctggatgttgatgtagtctttttatttttactatttctcaagctactttcaaaaactacacctcaggttgtttcaccattgactaataaatgttcttaaatacattttacccttctctcagtaaatcaaggctagaatatttagacaggaaaatgagaaataaacaactgagaacgatattaggaagaagctgtcattcctgcaatctttaaaataaaatagataagcaagtatttttgtgttatttctttgaagaactcaaagtaacatccaattaaccctgtgaaataaatatgagagaaatattaggtgcatttttctcatgagaaaaacagaggagaaaagtgatttgcttgttcacaacacatcatgtagttaagcagagcttgtaactacatacagacctcacaattagccagtaaatgtaatagctaaccatcgggaagcatgaagtggcccaaataagacaaaacaacccatctgtcacaaatggctgctatttgtggggtacgaacttgccagagtcctcaccagttctccctgacatggagtggggtctcagtggccattcctgggcctttactcaacctgcgatacccagttctgctacctgcctgaaggtataagaccccctgtctacacaaatgtagacgttgcttgaatcctggagacttgttgcatgggacagaggcaaggcaaagagggttagtgatgagagatgctaaaattaactgaagatctcttgggagagatgagcttgagcttggccacgcaagatgtgttgtcaaggtggagaggaaagtaaaaaggcgtcagagaaggccactagctctaggtctttgggcaagtttcttatcttgaccttgatttcttataacaaataactttgacttataataaataactgtcaaactaaaaacaaaccaactactatgtaaagataacagaaattgccacaaatttggcttcttgaagtggcagctaatacaataaatatgggagctcattcattgcagattcaatcaataactgggcgctagtctaataaccaggtccctggtacctgatttgacaaagtccttcaaaggagtttgagaatgaaagccaaaaagactatggtcctcaaggtgcgccccaaacagccaggacacaggcttcctgagttctctcctggggagtcctataaatgtcctttttgaccttggcaaaccactttggctgctgcctcatgttttctatctgcaaacagtagctaatgagtgataccttcccatggggtttggggtggattaattagtgaatgtctgtcatttgctttgaagaccagagctctacctaatgtaaatgagaagtcaattccctgagaaaaagacgctgcctcacaggacagtggctgttctccatctgaagggataagatcttccccgcgttttcatctgtcagaagaaaggggtttgtttaattagcaggcaatgtttttctggaaccagcctctgaattagcaaagaggctgcaactcccagtgtattattatcatttgtcttttccgctgctgacatttgcagtctgttgcaagtcacaaattcctaaaggatagacatactggggagaaactaagtggggaaggtgacaagccagtaaggatgtctgctgaaattgaaatttaaaacctcgcaagaaacatctgcaagcttacctgggcaaaatggtagcagagaaagtcaaggtctggtgggactaggggtaaacgccttcccattttgtgtttctattttcctgtctctgaaacagggatgacagtcttcagcgttttgttcctttggcatgttatatgggctggtgctgtcacctgtgtccactgcttcacgatttttgccacagcttgccctataaacatgagttgtttttccattggagatagctcccacttagttccctgccacctggatggtatctttggagtggcagagatgacagtttttaaccactgtcaaaagttattttgcttgtttgcttattgataggctgccactctctactacaccaatggttccacgagggcaggcccttcatccatcttactatcgtatcctcagtgcctggaacttgcctggtgcatagtagttgctcaatgaatactgtttgagtgaattactgcctgtcatctgtacactactgttccaatgacatcagattcctgtttagaagaggaggaagtctccatatccaaagcattgtgggttgaattatgtgttagtcttcttgtgttgctataaagaaatacctgaggctgggtgacttataaagaaaagaggtttagttggctcatggttctgcaggctgtccagaaggcatggcactgccagcttctggtgaggcctcagggaacttttactcatggcagaaggtgaagtgggaacaggcacagcacatggtggagggtaaggtgccacactcttttaaataaccagatcgcatgtgaactaccagaggcagaactcgaacttgcttatcaccaaagggatggcactaagccattcatgatcaaatcccctcccatcaggccccacttccaacattgggaatcgcatttcaacatgattttggaggggaaaaacaatcatatgcccccaaaagatatgttcaagccttaacccctaatacctgtacatgtggccttatttggaagtaagatcttttgcagatataattaagatgagatgaggtcatagcatggatccctaactccaatataactggggcctttaaaagaagagagaaatttgtacatagagacacagacacatggaggagaatgccatgtgaagacaaaggaagggattggagtggtgcatccataagctaaggaatactaaggattgccagcaatcgtcacaggctagaagaggcaaggaaagattcttccctagagctattggagggagcatggacctgctgacaccatcatttcaaacatctagcctttagaactgtgagagaatacatttctgttgttttaagccacccagtttgtggtactttgttatatcaaccctaggaaactaatgcctgaaggttatcacagtctaacaagaaaccctttggggaatgaaacaggaagtcctgctcaccgttgcttagaagctccgtttactatgacctccactgcggagcaaggcagtatgtttttaatcacagcagatttatcatagtggtaacagattgtggataggaagggacggaaacaggtagaattattgaagcttccctttgtgccaaggatcctcctgacccttgctggtctgtctggtcttcaagtatggccacctgaggtccttcccacatttctcccagggttagctttacttggcatgttcacccccatgaatactaccagctcttcattggctgcctttcattttgaggctttgtgttctactttgtgtggtctgtattctgtttctcgtgaaaccactgcagcctgagtgacagttatgttttagggtattttttctcatacttaatggttatattatcagtaaggtccaaagagtcagctgaaatggtacatccattgctctgaattatacttccttttctaactaaggaatatttaagaattcaattcaaatatagagggaatatcaatggttcttggttctgatttttagctctttaaggaagactctattcactctagagtagtgattctcaaacttgtttaggctatagaccctttgggagtctgaggatgttatagagtctcttcccaggtaagtgaacatccacacaacatctggatgaggccttgtgtcccaagttaggaacccttgttctaccctaactggatcatcttttccttcatctcagtttggcaaaaagggaagccacttggcccttccaatgacttctcaggagaagggctagttgttggaagacagtggagtcctgaccttttggttgctctcatctcttttttctttttttagataattcgccagtgtgattattaatcttatgtattaacttgacagggacatgaggtacccagatatttggtcaaatatttttccgggcgtgtctgtgagggtgtttctggatgagattaacatttaaatcagtagactgagcaaagcagatgaccattataatgtgggtggacctcaccagttgaaggccagactagaactaagagactgaggaagagagtcttcaatctctctggcttacaattgaggcatcagtcttctgcctttggactggaatttatactattggctcacctggttttcagaacttcagattcagactgagcaacaccattggctctcctggaccttcagcttaccaagtgtggatcttgggacttctcagtctccataactactgcatgagcccatgccttataataaatgtatgtatgtatctatctaatctcattggttctgtttctctggagaaatttgactaatacaaccaggggaagaggcaacaggatctacacctcattttacctttgaactagttcttcctcagtggttcttggcatttttttgtgtatgtgttcaaaccagaaactcctaggaatatttctggtgtattaactagtataacatagtatgcttacagattttaagaaaaagtctaccagactagggagtctgacatggtcttcacacaactgtaatcataagaggtggttttgttttacttacggccaactgatctttgataaagccaataagaactaacattggggaaaagacaccaaagaacacgaatagacatttctccaaaaaaacaaaacaaaacaaaacaaacaaaaaaccatacaaatggccagtaggtgtatgaaaaaatgcttaccatcactaatcatcagagaaatgcaaatcaaaactacaatgagatatcttgttccaggcagagtggctgttattaaatagacaaaaataacaaatgttggtgaggatttggagaaacgggaactcttatataccgttggtgggaatgtaaactagaacagccactgtggaaattgcataacaatttctgaaaaaactgaaaatagaattaccattggatccagcaatcccactactgggaatctacccaaagtagaagaaatcaatatatcagaagaatacctgtttattgcagcactattgacaatagcagagatacggaatcaacctaagtgttcatcaatgaatgaatggataaagtaaatgtggtgtatatatacacaatggaatacaattcagccttaagaagaataaaaccatgtcatttgcagcaacatggatagaactggaggtcatcatcttaagtggaataagccagccacagaaagacagatactgcttgttcttactcatatattggagcttaaaaaattgattacatggaggtagagagtgtaaaagatagataacagatactgggaagggtgagtgtggggagggggaagatgaagagaagtgacttaaagggtgcaaagatacagtgagatagaaggaataaattaaatgtttgatagcagagtagggtgactatacttaagaaaaatatatcgtactcaagtgatgaacacctaaacatactgacttgatcggtacacattatatacatgtaacaaaattttaaatgtactctatatttgtacaaataaaacctaaaaaaagataagttatgtttgctttttttccctcaacatacagctccatttataatacatatgcaccctgaggatactgatatttaaaaaatggattcttgaaactggcttatgttagtctttggtttgtcagtttaagaaaaaggttacctaattttccaattatttagttggtcatatatactttgtcccaatgtatacattttcttttccactatatttgtcagtctgctcttggtggtagaggtaacaatccaggtggaagttacgtccccctgagaagaggcagctgcttttcgctattatcagaatcaccactctcctttacttgacctaaagtacctgctctattgggagggggtagagggaggggcagaacagcaccagccttccttgaacaagagccactgaattagtgggagcaaggtggggtcattgcaatgctccccaggcagtgggtgagccttgtctaagtccagaaacctctccctctccattcccacagcacatcctggatcctgaagctccaaccgcaagcctagtggggaaccactgttgtgtcagaccaatctggttttcagttgcagccagggaccttcctcttactagtgtgtgacctaggacaagttccttaatctctggaagcagcgtgtgcctagggctgagtgagaatgatagtaaatggaaagcactcgaaggcagtgccaacgaactgtggatgctcagtaaatagtagctgctggctgggggcagtggctcatgcctgtaatcccagcactttgggaggctgaggtgggcagatcgtttgagcccaggaatttgagatcagcctgggcaacatggcaaaccccatatctacaaaaaatacaaaaatttaggtgagtatggtggcatgcacctgtggttccagctacttgggaggctgaggcaggaagatcacctgagcccaggaagacaaggttgcagtgagccacgattgcaccactacactccagcctgggcgatagaggaaaccctgttttttaaaaaacagtagcttatttcctagcaatctgcactagaactctcatggcagcctcttaaagggctcctttctcttctgcctcttccaccttgtacactaattcagcttaatcttttaaaaataatgtcagttccctgaacaaacattttccatggaaaaatatttaatagtgtcccaaatcctttactctggctggtaagattgtggatgcctaatattttcttctttgtttctgtctcttcttattaaccagaaaaaaaaaaaaaaaaaaccttccacacttttcctttttccatagtagtgagaacagttctgagatcactctctggtggccctccttgaatttgtctttattggctgtgtcaccatgtcacttaccctccctcgatcccagattatccacacctgtaaaatacagttcatacaaggactgaatgagaaaatgcatgtaaaacacccaacacagtccttaagcaatggaagcttgggtactgagaagtgcccgtaatactggccttgttaagtatttgttaacagatcagtggaacataatcaactacttctctctcatttcctaaccctctataacctaaaaccttacccttggcctcagttcagagttcactgtcagactgggttttattttggtagggtcagcctggctgtccttgtgttttcatctgtctctgactgcatgcttccaaggccatggcactgtcttccacaccacatgggcaaatccaggagtaaaggcttcctaaattttgttaagggtgagagtgttgtgcataggagaaactgacagccagagacacccttggaaggccgtggccagttccacaggacatgtccacttgggctgtatggggtcttcaaacctttggacctcatgctggtcagtactatgagcagcagcctcaaaagggatagctgtggactatctattggtgccttgtcagttactatttaaagcaagtcccgcagacctggtctctgcctctaggatcagctcagggcaaacagaggagtggatcagacatcacttgtgcattttctggaatgtacagacatgccctcaataaagagttaggcatcataatatgtcctggttcagtatattgttcatatctgttttttaatggttgaaactctaatatcacttggtattggttttctattcatgcatgcaagtgctctgcgaaaactttatgtattcatttgtatgtgagtatttgtaaaaacctcaataaaaagttattagcaataatggaaagaaaaagtataaaaatcttggatgtgcagtaaaaggagattttgactattttcagacccacactagatctcaagtcatcaggattccttgaggcatcgaggtcaccattgtctcttgcctaatacaacagcctgctaagtggtctcccagacactacacttgctttcctgcaattctccacacagcaaccagagtgatctgtaaaatagtcaattaggtcacattattcccttccttaaaactctttgatggacacttagttcacttagaataaaatctcccctcttaactttgcctgccggccctgcgtgatctgtctgcctcattgctttcttcagccttccttcctccctcttctctccctctcaccattctcagccacactggccttctttctgtttcttcaatgcactcagctcccctctacaacgtgccccctccccccaggcctttgcatgtgctggtccttctgcatgggatggtcttctctcagctgctcatgagggtggctccttctcattttcacttttagaaagcccttccccaactaccttctctaatgtaattccccactccatggctattctccactgtggcaaataaggatcatactgtgtaattattctacttgcttaatttgagttttgttttctccccctagtacattgttagattgtaaactgcatggtaacaagggctgtaccttccatccccagcatctagtacagtgcctggcacttagtaggcactaaataaatatttgtcaaatcaatgaagtgttatatctttgtgcacttaaaattaatggtcactggagtctattaggggaccactttctcttgccttgtgcatatatcttttcctcagcggtaatgatctccttttatctgtcagtagatggagtatatacactcaaagataagccttcttaggataattccagttgaaatagctcataaatggtccctgcaagtattctgagagtacagccaggagacggaaacatagtcctctagagtttcaactagaactaacttgtagagcctctttcaaacaggaaagaaagaggaaggaagtctaaattctccaaaaatggtgaatgataaagccaagtgaaggctacacttcctctcttaaaaaatcactacctcccacaattaattagagaaaaaaaaatctgataaaagtagacttgtggaggtggaacagagttggggtgaatgaatagtaaaggaactttcctcttaaatatggggaagaagaaaaggaaaataaacttagacactggaccagatagtccaaaaaggaatcccttagcacataccatatggaacaatatgagttttaattcaagaggaaaaggagacagattttggcactgttacttttccagctccttttactaccagcagattgattccatttcttatgccctgaggcttttcctgtttcctgtcatgtgaacttagaagcattttcctctacccactcctactcttagccctctccccttccctattttttgttcttcctcaaacatcttccatctatggccacctactggagatacagaaatatctcctaagattgttcttattctacatgcttgggggtaatattctaaatgtaacaggattaacagacattctgacttcaaaatcttgatgaatgcattctcatactgttcagcaatgtggtactaggtgcagattttccaggctaaaggaaaaaaatcatgagatcatttttatgaagagcagtgcaaattctttcaaattcattctaaattcattgagcactaactagtctaattcctcttttatgttccactagaagttgcagacttagattttctaaatagcttgcaacccatgtcaacaaggcatttttctatatggacatttttttctgtatgcacaagtactatctattttctctgcttacatttgtttgataaagaatagatctctataaatcagaatctgagttttctttaaataaacaattacatatgatactatagtggtagatacgtgtcattacaaatttgtcaaaacccacggaatgcataacacaacctcaatgtaaactatggacttcggctaataatgtgtcaatattgatgttaataacagaggaaactatgtgtgggacatatggagtatatggcaactctgtactttctgctcaatttttctgtaaatctagaactgctccaaaatgtaaggtctattaatttttaaaaatatgaaagtttataatcccttggttttcagatatttgatgatatcaaagattgttttactgaactactgtgaatagcctgaaaacacagcaacagtgaaccataaagaggcatgtaaacttccactatcttaatgagatgctgatgtaacactgaagcctggataaccctaactgtgtttgacacattccgttctccatcttcccgattcaaaaccctacacggtattcaaagcccagtgcaatgccatcccctttatcagaacctccaaccctccacctggaagtaatttctgtcactcctacaccctggtggtaatttgcttgaacttttccagccttcacatgttgtacacaggcctctcctgtttctaccacaagatgtctttagctgctagaagatgtttggattgttctccttgattagcttgatttttccccctaatattcgcttcgttatggaccccagaggttgtatgttggtaacaatgcctggatcattcctctctaataacactgtccttgcctatctgcaagtctgaatgttttgtgatgttgcatattctgctgtcagttttgcttgaccacatctgacccatttagggatcttgccagagtcctgaacatataacttattgcctactgtgtgccctgaactttccactcgagttgacctttgcaagcagtacttgctctaaaagggtatcaaagtcaaacgaccaacttttaataatctaactacacaagaacagggagatgtttcccagccttagcgcagccataacccaaacaacacattgctccataatgctcacaataaatcctgtatattgcataaaggatgtttcccattaagggcaaccttacagctctagcaatgttttttgtccgttgaaggtgaaggtgtgtatgtgtttggggtggaggtggcggtaggggagttagttgatgggtgagtaaagaaaacagataagagtctgagaccaggggctgaccagagtacttagtagaacaacatggccaaaatgaaaaaataaagttgtagaacccgtacaggtaattctcctttgcattggcagcatcagatccctattgacatgaaatttgaaatcattggttagcaaaacaattttgatttcccattgagttcttggggagggggtgcaaataacattggtgaagctgggctgcccgactctgccatcctcccatatggcaggtgtgcaggccaccttggcctcctgcgcgtgctgctcctcatgggcagctgcagtccgcccatcgtctctggggctgatggagaagtgctcgcctctctggcagagggagcttcacttctgttccattcatctccctagctgctcagcagttcctccttttggaggctgctgttcctctcctcttccgaggcttgggcatcccagcggcaggacctgggagcccaagcccccaggccacgtgagcctcgtgccccggtgcacagcagccccgctcctgcccagccgtcagcgctcactttcctcccagcttttgttccgcacctttcctccctacaggttctggcactgcgccttgctgctgacttgtatttttttctccatgatacaggagggagggtaattaggaggaaatcctgagaatcttcaaactactggaaaaaaaagaaaatgctggcggcgctattcatggaaagtggaatttggcctggctgtgacctcccccatgcctggcttagactcctggtggaggagacagatggtgaggtgaggaaagctgtgtgacccgatcactgccggccagagcaatcggcaggagcagtgaagaggagatcattttaaagcaaacatggactttagggcaggagagtagaagggtaaatctttatatattggaagccaaggcatttctgaatggaatgagcttagcagttttattttaaattcagcgccaagaggtagacagtggacttgcccagcatcaaatctcacattcaacactggggacagctagctcagaatctgaaagggacagtcatggtccctttctaaggaaatgttcccagcagttaagtaatccgatctgaattgtggaataaatggtgctttgaaatgtgtttctcattaatcttcatttaaatgtagacagctaagtggtttggatgttattttgagagtgtctctttaaccaaaaatttattattaatggcaaatattttagggcatggttggctgaattttcctgggtgtcaaacacatactgtttcctgaaaatcataaaatgtcctccttctgttcctaacagaagtgacatatcccattgtcttgtttccacaatgcttaactgtgttataacaaatgtcaatggtgaattaactatccctttgaatgtttcaaatgtgacttttaattaagcatattaacctgatatattatcatttgagaagcaactaagattatatgaattttaaacttttggatgcccgcagaacatgaaaagcactttatgaggcttgcattaatgcatatttcattataatgtaattctatattagatattccatttatgcatagagccaaaatagtttccgctctgtagtgacgctgatttaaatgagtaaatcacaaggaatcgagaaatcttaactctttgtgaatctcagcattatcatgcatataaagaaagtctttgtgggcagaatcttacctttagttaatagagtacagcattttttattcaagtgggatggggtaagagaggatggatgaactatttcttctgtataacattaactgattagagacaatcctgagcattccctgagcatttttcatttactccacatatagcagctgatcagttttgccacacagagcagtcaataaggctgaagtacacatgagaaggttatgaggggctggtgggctgccttgcccacatgggtaaggagaacatgtgcaatattaatgcataaagaaactctgggagctagatgcatgctactctgcagggctgccttaaagtatcctgtgtaatattactaatagaccttttacaatttttatagcttcccgagttatttttgagtcagtgctagcattcaattatttcctgttgaatagggaacaaaacaggcctaaagactgaaaggaaaagctgctgtggggagcggtctctccagatggaagttttctggcagattgtgatttgtgactcagaatgagcccagattactgtgccatatgggtggcagcagtgcctgtagacactattcagttattcagtaggctcctcctgaactcctactatgcgttggttacttgccgggcactgggaaacaaagatgagtaagcgatagtatctgccaccaaggagtccattcatttattcattcattcatttaaccaacatttactgagcatcaatgatgtgcattgtatattaggggagttgagcacgtaaacatagagtaaattaccatatggtgtgacaaaatcagttataggaaaaaaatgctctgcagcttagaggtggagagagagaaattatatttggggcagtcaggaatcctcacagaaaatgtgacattcaacatgaatgttgaagtaggattaggaaattattgagaggaaagaaggacaaggtcattccagacaatgagaacagcatgagcaaagtcatggagttaaggtttcatgcttgggaggaaaaataagaaaataagaaatagattgtggatatagcttttggctcatagggaggaaatgcaactagagaaataacttatgcaggatctttcatgtcatgttagagtttggcattattctgaacgttgggaatggaaaattccagagctcccttctgtctatcctcatggcagatatccctaaaatggcatgaatggtattctttcctgctgagcccaggccaacccttggaatctttctctatgtagggttcaaaaaacctcaaccaacttactggaactggtacaaagaagaagtatattcaccatcttggttacaggcaaaggaagcaaagatttttaaatagggaaatgacaagtgtgtgctgtcattctctatactgatttgattattgggaagaccatttgaaccggtgcactggagaatgaattagagtggggagaatcttgaatcaggaaaaccaataggaaactgtttaatagttcaagtcattggttctcaacctgatggcccactaatacatttgagatgcttgttacaaatgtcaatacctaggttccacccttgatgaattaatccagaatttaaaacaaaacaaaagccaagtggttcatttgtgcccaagggttgagatccacttgtctgtaaatctgatcatggaaacatttatttattagacagaagaggttttatctcttttaatgtatacttggagaggcgagtggatgactttgggaagatgggaaatgatttgcttccattgggcctttactcatatagtactactcataatggctgctttcttgattgtcatctatatcgctgctgacttatctatagatatttaatccaccatatcaatcatctgcatatgtatttttaatccccaatttacagataaggtaacaaagtgtcagagactttaagtaacttgcttaatgtcataaggtaattgatgccaactacaactgccaatacatctactgtagttttttaaggggaaaactgatgagaatgtgaatgtttctctctggttcaaaacaaggtcatccttacccatcaggaactgtgcctttcatgttctgattggctcaaatcctcactgtatgcacattgcacaattgtcctgcctatgtgtgctttcacgcttgtgatttctgtgaacaaacagtaccaagaaccaccacctcccaccccccacccaaatcagagacatgttggctcactttaaatatccttttaaaaacatccatacaaattggatttctttccctaattgttatttagcaagcaaataatgctccatggctgcctaattatttggattgtttcagaactagtaagcagaaaactagtactagcaatagtattcacagtaaacactaggttcttactttgtctgaaacttctcttctagagtctctctatacaaccaaggcagctctcatagccagcacccatgctatgcatttaattcaacaatgtgggtctcatttataagccagcaggctgcttcctgacctgggggatagaccacgaaggtttggctttaggaggggcatgctactgcaaccaggtgagccacatggcttgcctagcaacaaagaatgccaagaacagaatgcacaagagtgaagaattcctaattttgaatccagtgctttcaactaccagattgtattaattcctagaaatgaaacaaagtaagagatgttttatttactgtatttattatggtttactcttttggcaaaatcttatgcattatgttagctgcttcttttttacttatcattggaaggagactctagaaccttgtctttccagttgttttttgtggagccccaggatttcttagtggatgagggaaacttcagtggatgtcatggggaagtgaaggtgaagttgcactcagctctacaatttccatcccaactttgattagaatagttttgcttttattaattttgtatttgaaaaaataatctgctacaattggtacaaagagcactgcactagatataagaaatctctgggtaaaacatttgtatatgccaatcaattggaattcttgttgtttttaataatttgaaaatccaaaatccaattttgatcctgtacatgtctggaaaaactggcatgaacatagctgaaaagagttgttataaagcccatgaacttgtctcttaggagatgtctggatccgcctataggtgctcagtcatggccagtggaattaaaatggattttaaagataaggtctctgattttacgatcctggtcattagatttcaagaaagagcatatattagcagatggctgttggaagcggacatgctgaaaagtgatagataccacaagggaagatgtgagttaagacttagtcacccactgcactggagggactatctcataatgaataggagtgtggactctgaagtctgatggattttggttcatgacccaatttggacccttacttgctttgtgattttgagcctcagtgttctcttctgtaaaacgggcttagtagcaacccttacctcataatgttattgtgtgtattaaatgaaatcatgcatgtaaggtatgtatcagtttctggaagacaataaaggctcagtaataatattctgattataaagtgacctgagtcattttttgttgtagaagccaaaaactgctgaggaaaacagagcattacaactatatatattagctaactcataatgatagccccaactcataaagatatgccaagatatgcctaatgagaagactatgtaatgcatttcagaaaactttccaaataaaatcatgtttaaagtaacacattttaagaaacaaggcaagatgctcattttgccactgctattcaacatagtactggaagtcctagccagagataataggcatgaaaaaaaaaatagcacccatattggaaaggaagaagtacaatgatctctgttcacagatgacataatcttatatatagaaaaccctaaggattccacaaaaaatctgttagagctaataaaggaattcagaaaacctgcaggattcaagatcaacacaaaaaatcagctgtgtttctatacactaacaatgaacactcttaaaaggaaattaagaaaacaatcccatttacaatagcatcataaagaatcaaatacttagaaataaacataaccaaggaggagacttgtacattgaaaagtacaaaacactgatgaaagaaataaatagacattccatgtttatggctcagaagacttaatattgttaaaatgtttatactgcccaaaatgatgtatagattcaataacattctggtcaaaatcccaatggcattttttacagaaatagaaaaagattctaaaattcacgtgaatctcaaggaaacctgaatatcaaaacattcttgaaaaagaagaacaaagctaaaggtttcataattcttgatttcaaaacatattacaaggctatagtattcaaaactgtgtggtactggcataaaaacagacatttagaccaatggaacaaaacagagcacctagaaataagctcttgtatgagcaaatgatctttgatgagtcaggatcacacaatggggaaaggatagtctcttcaacaaatggtgttggaaaactgaatatccatatgcaaaagaactaatttggacctttatcttatgccatatagaaaaatcaactcaaaatgaatcaaggacctaagtataagatctaaaactataaagcttttggaagaaaacatagaggaaagcctttatgatattggactcaaatgatttcttggatatagcatcaaaagcacagacaataaatgcaaaaatagacaaatggtactacatcttctacataaatttaaaaacttctgcacatcaaatgaaacagacaacaaaaaaggcaaccaatggaatggaagaaaatatttgcaaaccactgataatggagtaatattcagactatgttaaaacttctacaattcaacaataacaaaataaccttattggaaaatgggcaaagggcttgaatgggacatttcttcaaagaagatatgcaagttaacaagcatatgaaaagatgctcaatatctctaatcatcaggagactacataatgagatatcacctcatatacattaggatggctactatcataaaaacagaaaataagtgttgatgaggacatggagaaattggaatctttgtgcactgttggtgagaatgtaaaagggtgcagctgctatggaaaacagtaagtatgttcctcaaaaaattaaaaatagaactaccatatgatttagcaatcccacttctgggtatatatccaaaagaattgaaagcaggagctccaaaagatatttgcacaccggtgttcagcggcagcattattcacaatagccaagaaatggaagaagcccatatgctcatcagtgagtaaatggataaagaaaatgtggtatgtataatacatacaataggatattcttcagctttaaaaaggacagaaattctgtcacatgctacaacatagatgaagcttaaggacattattctaaatgaaatcagccagtctcaaaaagacaaatactgcataataaccacttatatgagctatttaaagtagtcgaattaactgaaagcaggttggtggttgccaggggttagggtagggggaaatggggaattgttcaatgggtatagagtttcagttttacaggataaaaaagttctagcgatcggttttacaacaatgtgaatataattgacactattgaactgtatacttaaaaatgcaaaggtggtaatttttacgtgctttttactacattaatatttaaaaaaattttttaaaatacagaaaatcttaaagtattagcttcagttatctggaaaattgacacaaggagcacattgttatggcagggaccatggtttgctacacagttccttttatttgtaaaactccaaattattccaaattggatgactaaactatagctaatctatatattttaaaggaaactatttatggatagtatgggagagaatattattattttattaataaatacttgagtccctaccatgagcaaagagctattaaattgcttgctcaataccaaggatataactggcttttctctcccttgaattgaattttcagcctcagagagatcagaagcttccctccttccaccccccaccctcattcagaactggccactgtggattttccgaggcatttatagccttctctaaattgtattttgtcatgtgtactctacccgtatgtcacctgataggaaacatcagctgaaatcagtgatgaaactgcctacttccaaagagttaaggataactccttcactcctcttgcttgttccttgactggatctgatcattcacatgtcccctgatgcagtcaggctctacttgaatctggcagagcagctccttcacaggactgtggactttcccagagctttcctgatgacctgctgtagcagaatcccctgggacgctggagaaacatatggctcccttggccttaaccgcaggctgctggaatcccaatctttagtgccagtgaagtgaactctaaacaagtgccccaggggattctgaactgcttccacacttggaaaccaccactttagaagcagcttggcaaaccttgatgcaggttcttgggggaaccaaagacagggaaggggaatctgtagcctatggtgactttggccttgtgcccagatccctttcttcctagacttgtgtcctttgttggtggaagagcatctgcctgggttctttcttgtcagagctggagtggcaccagtcatggtcccacagtggagagtaacatgcttttagctattctgtccttgaggaaaaaggtaaaagaagaaaggagggatccctgaatgctaattaagtgacttttgtgtataagagatgaacatgcatgtctctttaaattaaaagccctattcaaacatatactcacatatctttggagagatacagaatgtgtacttcttgtaccaggctgaaaaactggctccgttatcacagtggtctcagggagtttcaagaaacaaaagagctctcattgtgattgcaatgtcaaagtgttatggccatcaacccagttgtgcctaaatacattttaagaggattcattataagtaaaaataaactgtgttttctgtaatatttcagcttgcacaaggaatgtgacaaagagaaggacattgtaaatatttttggccttatttggtcttggtatttctctatgtcagactgaaaatcctgacaagcagacagagcagtgttatatttaacaaacaccttcatgaaacccatggagagaaagagggagggagaaaagcagtaagcgagagagctagacagctcggtttaatcatttatttccgattaaatcattcccaaccaaaattgtatgtacagatcttgggacataaatacatatacttaaaaggcattctttaaaaataatgctacacctgactgcaccccaatggccttacaggtgcttgttttcaccacagcaaccactgggtagaggaaaagaatcagaatggtccagggcaaatcaatcatcatttatgttaaaaacaacttaaagctgcctggggattacatatccaggcttcaaaagtattaccagagttatgaatgtgagaatggtgcctgacacattctcccattttaaatattagaaaacagagatacgaaaaggttacttgcccaagtcactcagtttttaagtgaaagagctgggggtttgaacccatgtgttttgaatccatgttcctcaacatcacaccacctttaacttattacataaaagaatgttatgtgaactgaaaaattcttaacttctgttctctgataagcattcctggcttatttattagtaaattacagcaaaggagtggttgagaaagctgggacccttcagatgctataatttaaatcttatttctgtctcctacacaaggcactgtgtcagttgacagcttttgagggatggaattttggtttctttgtgccaccacctgccaccaatggtggcaatcaacatcaataattatttgtgagtctcctggaattctgctttgctctatctcacaatattctcattagagcttcctcctggtgtggaggttcatcgcatggccccttggacagggcccctgagcctccctccctactagtatgtaatgtctgtcatctttttctttcataattaattgcaatttgcacagctgcatatgaggtgagtggctggaggaagaaatgcagcttccggctctcttgcttacctacccagctcaagccttggttgaggattttctctgcttgaatcccaggctgctcatttcttatgcagtagatagcattccttttccctgctatcttctttatgttacattccccccttctacactggcatactatgttgttccttaacataaataaattactcttcagattcttttccctgatgttcttaaggcttcccgtcacattgtattgccacatcatttaaaaatgttgcagtagctggtgaacaatagttaatgactaaaagagcagactgttgagagctatactctggaatactcaataatcacgtctactctgatagtttcttttcctgttccaaagctgagcttggttgtattcagttctgatcattaggttcatgttaacaactgttgctcaagtcactgtttttcaaaataattattaatacaactctgggagtgacaactccttctgtaaaaggatgctgctgcccgaatgatggggtgtgctatgtacaattatggcttccaaaaggtattaactgacataaaaaaagcaaccaagtcaaagactaatgcataggagaaatctcaaaagcactgagaacacaacatgagaactttttgcatcgtgacattgtaaacacaataataagtgacttggaatcacggttgattaaactgatgttagaagccctcagtactattataccacgcttcatctcctgagcaccctgtgctttgttgtcagccaacaaactataatttcatgactgactggcctaatacagtcttaggttccagattctgtgcacaacctcaccagaccacagaagttaaaggaaaagcaaataaataaataaataaaacagtaggcagaggtcaaaagacaatgctcaacaccagcctgaaataaggcaagtctctcacaggaatacattcgggattttactatcatttaactgaaggactattttgattacctgctgattcaacattaactagacatttattagaacacctgctttgtgccaggcacagtggtaggcctggaggctatagtgggaaaaataaaacaggtactaatgagtagttggaatttcttaatggaaaacaagatcattctccattgcaaccactctatagctagtggaggctttgaagagactcttagagaggtttcagttcagatctttcctggggctcactttggtaccgtcttcaagatttctcttggaaaggggcattaactccttatcctatcttagatgcaatcatattgagtttttgcccttaccatattcatcagtttacatttctgaatatactcataaaaggtctcctggtcaggtcttatctccactcactaaagatctcttaacatccagaaatctatctccagacacccttttatgtgctctttctagaatgacaatataaatgagttggtacaagaaatgtgaaaaagagagattggaaatctattgaaatttgctagtcattagtgcagaaggctttattcacttccaaatattttctgcatttaggatcacctgaactttatcacttttgctggtagcagaacaattaagctgaataggacacttaattctaagaaagttctaaagaaatctttaaaatttttaagactatccctctcactatcctttaggctgaaagtctgtccaaatgtcttttggcacttatatggaatatgatgaattcctttcgctggatgtatctcaggatagcattaatttggtgtgatcgggaggtgaatttctttaggatctttttcactgttcatgtgctgttttgcagttcctttggagtagtgggggcttaagggggcttagctttcataaacttttggtcttgagaatatatacctgagatggggtcggtttgggagcctccaatgcctgtcaatttgggaactccagagtaggattttataaaaataatcatccattcataactgtattgagttacaagggagggcaagagagtcatcccaggtcatagtcgtacaatgtaaatttagaccaagggatgaaacgtgttggagaacaccctgcaataatcattattgggtatctgtgaatttaacacacttttcagaatgggacaagttgcttgccatggtaggaaaagctgtgccaaatgtttgaggagaaatgtggagaggaataacattagcttcagataccaaattgcaaattaaacttcctgaggatttcccgaaccctgttcaaataaattaaaattttgtttaccaaaatgactccgatatgcaaatacagaacacagtgttatataggtgctagggactgaaattttttacaatcatataatttattgtaatacttaatattatgataagaccgttaatttatcatattttccctgtagtgtttactcacatggacggggatagatccagatttcatgaagtctgaaggttacctaattttggaggctattcttaataaaaagaatgcacacttttgaatatcaacactggtcccttacaaaggacccatgcagatgaagagccctgaaagctgagtttcattgaatcccgggtgaaactacctctgaatgtggagctgtgttatgggataccgcatcacagtcagaacccagctctgctgccacctcagtaggaggcaaaggtgtaaacgtggaaactatggttataaggttcatactttactgaccatcattgaagctgcttgttgggtcccttaggaagggatctctcaatgaaacaaacattagagcttcttatttttttttgagacagtgtctaactctgtcacccaaggctggagtgcagtggcaccatcttggctcactacaacctctgcttcctggattcaggtgattctcctacctcagccttctaagtagctaggattacaaggcatgtgctaccataccgagctaatttttgtatttttagtagagacagggttttgccatattggccaggctgatcttgaactgctgacctcaagtgatccacccttatgaccagcagaccctgatctaagaagctagatgattcctcatgaggtcacttataaaccttattgctgatgtatttcagtttatttattggactatcttagattttaaacaccccacccaatgccaccatctatgtagcaactagagcaggactcacaaataaaataaccttcaaggccaaacagcttccaatagccagatttgtcaagattaacttaaggttttaaaattaggcaatgcttgtagacacaaaccactgtgggcaccataaaatatcaccttatttcaaaagactgagaaaactgaaaatgacctgaaaaattcctattgagtgatctatttaatcactcaggtgggttatggtgtatctggtgcatgttcaacctcaggtgcaggtgcatgtgcatgcaaatatacacgcgccacgcttttaaccatgcatctctctttgaaaagatcattccttctttcttatctatatgtgaacaaattgtcaaaacaacctcaaatgctagatgatataatccccaaatgctagtaatataaaaatgactgtaataatacaagtgatatcattgctatacatagcaccacacttttactgtttctcaaatctacaactatcctattttctagtgtttgtttatttctttattcactgaaatgactgatatgggcagtttagacacccagaggaggagataatggttttgattgtgctagatggtttgactctgctgagtgtatcctatagacttaataccaacagaggtcatggatatttttttcccacttcttttcctctttattgttaaggagactaattgtgtgtgagtgtatgacaggaaatgttttgatttttttgtagtggcaagaacaggagggcattcttttaaacatcttttcattttctaggcaaagcgtgggaatggaggatgagagatagtcaattttcagaataagatgttctaccaagatgtaaagaggggaaaaaaagtaactttcaacagctaggcaagaactgccacaagcagtagtcgaaaaaatcaacggcatggtttcctaatgtggtcttggattcagcaagaaaatactacagagagaaaactgcaggagtccctattttgtcccctcaaaatgaattaaatggtctagtggaagctgaaggactctgaagatggtgagtctaccactgattcttcagatggtgtcaaagatgattcctggttaggtataaaaagcagcacttttagtctgctattcatacattaaaaatgacagagaatatacacctagaatatttacctagtactgctgccttggaaacatggttctaggtctcaggagtttcccaacaaggagtctttgtgctcttgagacctcaacaatgtactgagctgactacctcagcaatattctatctaaactaacacccaggtatagtgatcaatggtctaaccagcttgcaagttatggctgaaatagtggtttacctatcaaatccatgtaactcccagaataattatgattctatcttttgggctggcaattatttaaataaaatattatttacaaaggaaacagcagggagaagaatcatgtaaattagattcattaagtggacagattcacttacagttcattttggaataatttatgccagttttctctgatgtcatctgttgttcaggttaacaattagctcattattaactgacaaaggttactttgtgtattggcagaggaaggcatattatttgggaaagcttctatgactaccgagctttcatatgggtgcaagagtttatttgcaaaaatccagctcttattttctcaaacaattcaatatcctgatgcatatatctctgtattctcaggaggctttgcagaggaatatatttctctttgctagtgtataagcagtcaagactaaaagagaatagggcaaaatattcattccaactctgtattactctctgctttgaactaaagataatattttctaatatattaagagacacctcttttacaggccaagttacagatctcttaaaaaatccaatatgatgatgcccatttacaaaattttatgatgagaaaattaactttaaaactcttttacaactctaccaaatgtaagaaatatatgtccctaagaaggtaaggcattagtccatttggaccttttgaaattctttgctgttgcttgcagtcttttatctgtctcagctgtgtgtagtttagtgactctgaccttgaggaggtaacagaaatggtgcctaccattaatgtggtttttcttttaaaaaacaaaatgtttcctggcatgtaattgtttttttcaaaaaagacttgaccctgtgcagtattttacacttacatcatttccccatttataattctttcttgttttggtgtgttggagggaaaaaaagtgttatgtagttctttaaaaactttcaaccaaataataataaacaatcgtaagattctgaagtatttatcatgaatgtaaactctgagagcagtaaaactggtaaaagatgatttccataataactggatgagggaggacccaggaaaaatcttgagctttttgcttgcataacagaatgaaggaaatgctgaacatggattaggtttggaagataactcctgagtttggttttggatataatgactgtgtctttgagtcatacaagaggaaatatcaaataagttccatctatatgactgaagtataaatttgagtataaattcgtttttgtttccatgttattgtaatccaagtatacagatggaatcacctagaaatagaagacaaagaaaagaagggggccttggatagaacctttattaattccagcattgaatggaaaagaaagatgaacctgaaaatggccagaaaagtagggggaaattcagagtattgagttaggggagataaggggaagagtattacaaggaggaagcaatcaacagtatcatatatgttgctcaaaagacacatcagaggagaactgaaaaatatccatctggtttagcaatatggtggtcattgctgacctaacaagctgctttagtaaagttgttgagatggaaaccagataagtgggttgaggaatgagtagaaggagagcaaatgggctgggcgcagttgaggataaaaatgatgagagaggtaaagcaggatagttgggtagtatgggtctatctgaagttgttgatcaataatagataagggaaccagtctctgcaggtgtgtaaatctctccaacagggctcatctatgcagatatagtgtgcccaaaagcaacatgttgccttcatctctggttagggtttttccagatgggtataacaaaaagatgatggaatccagactgtttgcaagggtgatatggaaatagtggagaatggattccaatctgaacaagtaggaaggtggagaaaggacattagtgaactggagtccctatcaggtcaaagaaggatctcatttattcatatgccaccctaatacagcttgtctatagaaggaggaaaataaatgtcctctttaaagctactgaatgcaaagattttttttttaattaagctaaagggaaaagagacctaggtccagttttaacaattccctcttccctagacttcgtaggagggcccaagcacagacaaacccagccttatatatatattcttacctgaatatagatttctcccaatatgccagttgaaactctctcagcataaaaaacctatggaaaaaatacttttgccttttcacttggctaaaagaagattattctataaaaagaactgtagtccagatgattaaacaatggagggagaggatgaaaaccaaaactttactcaaatggaaacctccttaaattttcccattattcttaatgaaataaaggctgagctaactgctagagaaaactgattcttgatgttgcagaaaataagcttaaaaataatcattctaaagtcttgtttctttttctgtagtatgcgtattttctgttctattttaatattatttttatgaaacctttggttaggctgggtgcagtggctcatgcctgtaatcccagcactttgggaggctgagtcgggggggatcacttgaggtcaggagttcgagaccagcttggccaacatggtgaaaccccatctctactcaaaatacaaaaaattagctagctgggcgtggtggtgggcacctgtaatcccagctactcgggagggtgaggcacaaaaatcatttgaacctgggaggcggaggttgccgtgagccgagatagtgccattgcactccagcctgggcaacaagagtgaaactccgtctcaaaaaaacaaaaaccaaaagtttggttaaaatgaaaagggaaagaaataaaatactaactatatagaaaatgagagaagaaatagtaagaactttgtattcaaactctacaaaatttttcagatgactcttgtcaattttatcaaataataaatatgctcaagaacaagtctaacttttctctatttttcagacagaaaaagagaagcagatgaaaggaaatagaattttctattttctcctcaccatgtaagcctcaaataaaaagcatctaacaattcaacgatcttaacttggacctggtaggagacatacactgaagcagtggctacaactccaaaatataccaatctgtgaggctacgagatgacaggtcaaatttttctcagaagaaacatcctagctatatttcatcattgaatgtagccatgtattggcccagtaatcgtcacaagcatcacaaccaattacttagggctttaataaagaagggaccttatgtagagtttaatcagatggcagttgtgggaaagaagcagaaatagttttgtttgtttgcattaacaaatggatgatgagaaagataaaaggggaaatcaagaagataacccaaaggaaacagataaatggaggaataaaaatgaaattctatcttcccccaaacagaatctggcataagaaaatgcaggcatttttggctaaaccagaaattagatgggaactacatctctttaaggtccagagttataaagcacagggtaaggaaagggcacccggataggggaatcctgtgccctgggttttagtcctagctttgctgatcctcagtttccttacctgtaaggagagagaaatgcttcttgccctttgctataacaaaaagaccaccaatattgtcccctgcccccactcatccacagttgttctgatagacttgggacagctatattttcaaccctctcttccaaatacttgagatgtattttatagatctgtgagtgagcagctatttctaattctgttttgaaaggattgttccaaaaccaagatgatacgggggatgccattagaaaaatatatttgtaaggtgacaatcaatttaaattatctcataaaaagatgagttctggcatatcataagtgaggtaagattgcttccttgtttctatcagaaatagggtaaaaccagctcagtcgaaagctggataagaagttaagcagtaatttttttttttttttttagagggaatcttactctgtcgccaggctggagtgcagtggtacgatctccgctcactgcaacctccacctcccaggttcaagctgttctcctgcttcagcctcctgagtagctgggactacaggtccagctaatttttgtatttttagtagagacagggtttcaccatgttgccaggatggtcttgatctcgaccttgtgatccacccgccttggcctcccaaagtgctgggattacaggcgtgagccactgcgcccggcccgaagttaagcagctattgatggcagtctgttggactttattccatttatttctttcattttcatgtaagctttctgtgattgaatcacaggaagttaatatgccaattatttacttcctgggagtctaagaaagcacctttatttactatatgccatcaaacagagctattacattatgttgaatttgtaaggataaaaaccatgacaagtgcaccatatttctagaaaataggttccaagtgtaaaacagagggctaggcatctctttttttcatataaaaccatgagtgaatgtatactccttttttaagaaagtatcttttgtttggccaataaaaagccaaattcttacagaatactttgttataagcacttccattgtgcaatatagttttggttggaaaagctaaaaaatgaactctacttcccaagcctattaaaaaacatggagaataccatatgagaatcatgggttgtcaaggtcttaggagttcatgaaattgtgtctagaacgctttgggtacgggggagttgctgttgtggttaaaaaacaaggaggggcatttccttcactttacaaatgaaactggagcttagagagactggttcaagctcatgcagcctgcaaagcctgggctcaaaatcagaacttctgactcctaatcttgctgctttgtgactgctggggttcaactgcatgttgagattcccaagaatcccctgatcttggggcaggaggaagccagctgcccctggtctctgctgactacagccatggggacctattcgttcctcagtctccaactctctgcccccagctactggcagacgggagtaacacgcatgtagcagtcccatctttgcctgtttattctttgtgagggacacttagcattttcagtccatcactgagctggaacaaagtaattttgcctgaagagcctgtagctgggcttaaaggtgcttacctgaaaggagagggatggtgataatctttttgctcctaaagaggtgggtcctgccaggtcagccctggaagctcttttctttggacagaaccaggactagcctcatcccacagaactagggaaaagcttcagcatgtggttgtgaaggagggtggggcccatcaactcacgtcctttaataataataacaagagcagccctttatcaaggacctaatttttctaggccctatgctatgtatggtaagtataatagtgtgaatctcacaaacatcctgcaagataggtattatcattgtcattgtccccattttacagattatgaaatcaaggttcagagagttcaagtaattttcccagtgtcacacagctagtaggtgacaaagatctgaacctagctatttgactcatgctctgtgctgttccaggcgattgagtctgaacttgattggtaggatgtggtatatcaatgttgtattcataacatcagttaacctggcggttaacttaagtgaagtctacagatagaagacaagttgatgagactgaattagcacaaaatactaaaataagtattctgcctatttttgagtaggatattaattgtagagcatccccctatgagagagccactcagagaaaaacaagttcactcagaggtttagagaactccatccgcgaggcaaggctgggcaagtggcttgtttacctcaaagaactggctcagtaggtaaatggagcaggttcatataaataggattctacctggagacagggaaccaaccacacatattgtctccccacaagagtagtctttctgccttccttgtttctttgactggcataagcagacttctagtcatgagggctggaaccccacagtcacctggggctcctacttcctcacaactggcacctgcctggccctttctctctgcagtcctggtacccccaataatgcggcatcagattctatggatttgaggccagagttttctggcatctatacttttcctttctattcccattgcaactaccataattgaggcccccgtgacttctccctaatcactgctgttagctctttctaaaacaagactatgtcactcttatgtctacaaatcatctgattcctcattatttactgagtcaaatccagacaccttcacctgatactcaaaatcttttcagatttccgtgaacacatcttgttagtctctcctccctggccaaccttatatgtgccgagctgcaatcctcacttaaccccaagcacacacaataattttccacatttgcacctttacttgtgacctttgctttgtctggaaaaagaaaacacgtctgttgtgtttgtttggtattttctagtgttcaaagtggtttcattcacctttttccatttgaaatttacagttactttgtggggcaaatatgattatactcatcttacagattagaaaatagtggctcagggcaggcctggaactacagttccatagctgaggggctgagggatgactagcagccagatcttcaaactcattgctctgtccacagctccgtgttgcttctctctccccgtaatctggcctttactccagctccctccagttgctattagtcaaattccatctttttctcaaagttcagctcgaatctaccaacaactgttaacttttccaaaataaacccagaattgagggctctctctcctttgtgttctcacagctccctgctcaacttgctgggtacttaaagcaattaggggaaaggcctgagggttcctacacaagaattttataccagcaatgatcaaggttttaaaacctttttgattatgatcccattaaggcatacatgttatatcacaacccagggtacatgcacacacccctgaaacaagttttatgaaacaaaatttacttctaatttctcaatgcactgtgatattttctctagtctactatttattaagaagtgctggttaggaacccactaaattgcttgtgagaaccactaatgagttatgatcagcagtttgaaaaaccctgatttaaatattattatgtcccttctaaatggcctagacaacattttcaaaggtttgcaaaagactgagctagcaaggaagataggtacgttcatcagggatttaatctgtagttcccaacaggaacacaaacagttcttacaaaggctaggccgagaaggaagggtctcagctggagagcatcaacttctgtttgttggaaggtcaaggagagggattcttggtgaatagttgatggtgggggggagtacccattccacagtgggatatcttccaaagagtgggatttgtagaagccaaagattgaggtggggaagatttctcaataaggcatatctctggactgagaagagacttatgtactcatcataaacttgaatatagcaggaaatcagctagaatttaaaaataataaaaatgtaataaaattctttgtttatatctgcaaaatgagtctgaaggccttcaggtctataaagctgtcactgaatttagtatcattttaactttatgaaagcacttgatgtttgcaaagtgcctgtccaatccccattaccatatgttcatgtttgaatattcagatcagagaaagcctgagactttagactaagaaaagggggaaaaaaaaggaaaaaaggttggccaatccagttaaataccaggcttctgagcttgtactgctagagttgtttaccatgtggggcacctgcctggggtactcctggggacttctcttccttcagcacccagagcctgcagtgcacacagtcagccttggtcagccacccctcatgactgacacccactcgctgctcttgggcattccaggcataattctgtgtctacatgaaccagtagaaggaacggcaaagggcttggcacctgtaacccaagggctagtccatagcgagggatgtgggaagaagtgtttgcagttgctgggaaggggcagtgaggaaataaagctgctacagtctttcctgtttgaggtattaaacacatgttaaaggattaaggaaagatttgcttagcagcctgcatgagctagaaatcacttctggccatgtttataggcgacaggtcagtgaaacctaatacactggtagatttcaaggaattccaaggaaatggcttcaagggatgtcaaaggcaatggtttcaggatgtgtctgtttcctttggaaaaaggttagctctctgatgcttcttcccctacatttaaaaggccactgaaatactagaagacaagcttagagactgatctggctttttagctaaaaaacattctagtagactctggccctaacaattacaccactggataattttcagtagtggaaatttaagaatcaatatcttaatgaaatgatacttttctatattaactcatttatattgggaacacacattgaatgctctaaaatagttttcaaagtagaatgaaacaatttgtctacatttttatccacacagaaaactggtgggtattttgcagggcagctgtcctggatcatggattattttcaatttattcttctccctgttagatcagcttccatacagccaccagttctctgcattataacaaacaggactctgtggctctgtgcttaaagtgctgcattggtttcctgctgtcaataaataaaatccattttcttaaccgggacacatgcggtccctacacaatctgtgcacatgataattccctggtttcacttcccactagttgccctgaacttttcaccattttctgaacactctgcaccctgttcaggcctgagctgtttccttgccacaaagtccttcacactctcaaccctgctccttacagattcctactcttttatcaccgacttccaaagtcacttcagtgtggcttcctggcttctccaaagctgtttagttggctatacccctctctggcttccatggcacttgctgtggtctgaatgtttgtgtctctccaaattcacacgttgaagcctgactcccaaggtgatcacattaagaggtggagcttttgggaggtgattaggtaatgcgagttctgccctcatgaatgggattagtgcccttatcaaagaggcctaagagagcttgtttactttcttccaccacatgaggatagagcaagaaagtgaattctgtgatcaggaaacgggtcctcaccagacatggacattgctgggatcttcatcctggacttcccagcttccagaactgtgataaataaaattctattgtttagaagctactagtctaatgtattttgttatagcagcctgaacaaactaaaaaaacacttttttgctcaggactttgtgatagctctcagcattggtggctggtgccaccaatctacctcattaggatgctggcatcttaagggcaatcaccatttctttctttatctctgtggcttaggagaaggcagaagacttttttccccttagggaagaagaattaaaattcaatttagttaaaataattgaataaaatataatagaataattatttttctgggggaagaaatatgaaaaccaaacccaagcctcacagcaataagatctgtgacagaaaggaaactttaaaggctactttagcctgtaccacatcactctacctttagccatccaagtaaccaaaaaagtataaaatattaacaagagagaattctgattacactaggcactgggaataagggtttcacgcttgacttcaaaggcttattcattgtccctccagaccacctgttttctctctcctgtaattctgtacttttcaggtgggttattcaggctctctcgcatctattcatgccacactcatcacaggaccttccccatgttactccctattcttggaaagctcttcctcccttctcattatttaatttcatgttacgaaatcgctgttcctccatggacactttctcacatgactggaagaatagcatttatttcttcaacaggcttttcctctattaaccaccagcataataatctctttgcctgctctttctcatgagttggtttgacatacattgagaatcatcaccatctaccttgtgaagtgaaccttaattagggaagagacatgtctgcccaacactctgtgtgatgtctatcatagcttcacatgcagacaaatgctggataactgcagtctgcgagctagacccaggactgtgtctcactggcaggtggtaatatgtgaagctggcagccatggcccatgctgataatgtgtctctggtagctcatgagcttgttggcagcctgcaaatatcttggctcctacaattgaaaaggagtgaccaagtaatgattaaagaacatttaaacattatactcttttttcatgggaaacaaatattaaaactaaattcaatactggcagcattaaggtaatacatatgtttttgtaagtcctatcatcttttctttctctttctctttttttcctaataaaatgattcagtactgacctagaaatcttcagtataacatcacactgctaataacaaaacaccatggcttcacctgaaaggtgcaattgaaagatttcctttatcacagtaaggtacaagagtaataattatcatcaaaggcttgtattgctttcattgtggaagagaaaaattgctgcacttctctatcaagtcaaaattgctatctgtagtataatttccagaaaaataactgagatgatggactataagttagaaaagtcataagtgaaacaactgcatgtgcagaacagaggacacaaaagaacagcttaacacccagctccatccatttactcaaaatcaaagaagaagaattatgtctgatttatagcccaagtgaaacctttcctttatggaaactaaagactttgaaatggtattaaaatacagctgttgcaactaaaaattattacaagtatataaaataatggaaattttagtcactcagataataaatgacaatattatacacattacatgatgcctgtctttaagacatgtggctatcagtaggtataaataataataatacatgtaatgagcactgttctaagtgttttgtgttaattcatttaattatcaaaacaaagctatgaggtagggacttccattatccccatttttcagatgagcgatggagacacagaatggttaaataactttcctaaaattacataactagtaagtagataggctataatagcaaatcaatagcttctggccacagaccaagacttgcttccgtttgataaaaaccaacagtggaatgtctgtgtgtttctttataccatagatgtgttcctgaaaagctctccataaatcagaagtttaaaaacagaactgtattggaatgacagctctgtgggaatttctttacaggtgcatcgcaagtgcccaggatggtgcctggcatgtggtagacttgataaacgtgataagcgagtgaataaattgatgaggaaagtctaatgtggtgctttgcactgagaaaataataaatgtattgaatttgatttaaaggaatttattttatccactctacaaggggagaagtgaccttctgatttcttatttgtgtaaatctagatcttcatatcattcgtttaaagtgaagttgaaatatgaaagcattttcatttaatagaaatattattaaaacttttccagggaaaaaagcaaaacaaagcagagataccaaagcttatgtagaatcccaggatcattgtgcaaaaatcagttaccatcttgggatccacaatattttataatcatagtggggaatccattgtgcctaggtaacaattcataaagtcatacgtgtagtcacttgtcaggtctccagaagagttttataccaactacagaatattgcagtgtatttaggccatagggtcttgagaaaattgcactatttaactgttttaaatgtgttggttctgagaggccagtgaatcagttgccatcagtaggaagctgttttaataactagccaactttactgatggattcagccaaaacagaggatagtatgtatcattcctattatgtggaagaagaaattatggaagatccaagttgttacctgaacaaaagactgcacatgtttctagatactgttaaaattcccctgtgttgattcctacccaaaagtcacaagaacacaggagtccaggaagaagctgatgttttctcccaggattttttaagagataggatctcactttgttgcccaagctggaaggcagtggcaaaatcatagctcattgcagccttgaactcctgggctcaagtgatcctcctgcctcagccttcctagttggtaggactacaggtgcatgctaccatgctcagttaattttttttgtagaggtggggtcttgctatgttgcccagggtggtctcaaactcttgggctcaactgatactcccgcttccaccccctaaggtgctgggattacagggttaagccactgaacccagcctctttcaggaagctttaattccacttcacttaggtgctaagtcaaagactttctatgggatttgtctacagcagcacctgtaaggatatggatgaccaaaagccaacctaaataccccaaaataataatagtattctaggtgttattaaccaggggatgggagtgatggctgcattgcagcccaatgcaagctgggctcctccctacagccagcttcccaggaaaagcagttataatgccatgtgcatatttatgtgcggatgccattagagaatgtgtttagggagagcctttaggaagctgattgcttatgtttacttcaaatattttgaaattttgttgctttctgaaactacttgtggagttatctacattttgcaagtgagagctaccaatgattttagtttgtggctctcctgaagagttcatccccccatgaaattctgatgatgccaatgtcttcctttcctatgctagggaccacctgtgatttcaaaggacttcgcgaccatgaggtacaaagcaagactttgtgagggtcaaccatgcctaccctcagtacctagtatattgcctccacatagtgggtaatcaataaagtatccattgaacaaaagattacacatcctttgctatctctcctgcttgctactgaaagtaaaacatacctctcctttagacaggtgaggcttttgctgaaccaccaaagaagctatcagactaaaacaaccaattatacactagaaacacttatgaaaatggcatcacacttatgttaaagctaccagaactcaccagatgggccacctgaactggggtccttggattgcttaggtgacacagcctgttctactgttgattacgaatgctggctccaagtccatcagtaaccttggatgtgcctttttcctctcttgggctcagttgcctcatttataaaactgggatcacagaactaacactctttgttcctgtgagagttttttgtgaagtaaactcaagtcaatcacaaggccacagcgaactaccccaataaatgattcatgggtgtttcagccagtcaggatagggaaaaaccgcagtacaggatcatcatttaaaatggaaattgctgttcacaatattcatacctatgacttaaaataagcatgactgtgtgggatataaaaaaattctgtcaagttttaggaggggaaggtttttctttccttttttttttttttagttaagactaaaatgccatttcatttaaatctattaaatacgtggtttccaagtatcattttgaatgcccctgatatttatgtttacatttcctgaagtggattcccagtctgccttagcctgtacaagatggggtctggtacctgccactttccttgccagactcttaagaatgggaaatgcaagcattttcagcatccacacatcctgctgtgggcttttcattttgttggcaatacctcagtgcactcttcattccaaccagttatgggaaggaaatctccatccacgtggctttatgtaattctgttactgtgtcaacttgccaatccattgttctttgcactttctttacacttataaaatgttggcaaccatataataagtccttattttcagttgatgttggcatacaggaagtgctaaaaatgatgttaggctgccctttttattttggaaaggtcattcttatcctgtgtcattcacatttatggggctaatttatacacacgtttaaggggagagatggtaaatgagagaatggaaagagactctagaaaggagacagtcaagcaacatcattagtcacctatgaataaggcaacatgagattctcataccagctgtaacactgcaaatccatgcaaataattttatctgatgtcttaaaatatgaataagggggcatcaatttcttcttcttacttcctcattatgagagattgctagtgaggatgataggtggctttacaattttgagtttgttactaataaaatcaacatgattggtgagataagacatatgtattcaatgtcactcagacagagaatggcttctaagccagagtcaggcttgaatgtgccagatcgttgtactaataaaacctaacaaaggatggaccaaccacaggaaggaggtcagctcaagcaatagggatttaagtctgctgtgagtggctgttcctgtctagggagtgagacactcaggctggctgtctacacagggtagcctggatgaaaacattaatattatccactctgtcttgctctgctttcagactcacttagcagccttctgataattaattggattttcctgctacatcaatgcctgaaatgaaggtgccctggatagaaaatattgcttgcttgcttaattgattcattcattccttcaacaaatatttattgagtgtccactccctgccaggcattgttctatgccctgaggacataccagggaatgaaaacagacccaatttctgtctatggaaggcacatatcctggttggagggaactattaaaacaaagtccattctgtgtcgggtggtggttaagcgttatggtgaaaaaaataaagcaggaaggagtgagagagttagctccttttagacatttagatatagcgccagggaggtctcactgatgagttgaatgaaagaggtaaaggaaggaagcaagcaaatgcctgagagaagagccagtgcaagggcctgggtgcagaagggtgcttggggtgcctgaggaaggacagggtagctggagcagagtgagccgaggggaaagagtaggataggaggggctctacggaccagactgtgacttgagccttcttatggctgaagagtatctccccctgcccatacctcccactccacaatggggatatggcaatttaggaatttggtgtctggtttgtacttctgcctcctttgagcttggctacagtgagtccacctcctattagactgaaccactcctggtgtctctgaatatttaactttctgcccctaaagagttgaggatctgattcagaagtcggggattccttcatggtggtgctttctgtgtgaccaacaaaaacctgtaaccttgttatcacaccgatatagtaccaataaatgttcaagatgtgagctctggactgtatcatgtaaggagtcctaattattcattgtttgaatggtgactttgtgaacatactgagacatgaggatttacaggtagagtaagagatatcatggacataggaatgttaataatcaagtttgtttaggtatcttgatggactttagggtcagactaatctgggcttgaatcataaaattgacacttactagctatggaaacaaagttatttaagttatctgggaatttgtttcctccacatcataagagggtggttgtaagaattaaataaaacaaaaagagtagttaaatgaagagaattaaatgaaataacattcctccctgctcagtaacattagttccatttctcatctctgcatttctcaatttcttctttgtactccataatttggaattgctgcccacgttgaatcataatgaaccttaattaatcatcagttttggcatcataggcttctttccaacaggggagccgctgttgcagcagaggccaacccaatcagtagtacacttgtgttgttatatctctagaccctcccagcctcctacagagctggggaggtggaatgaagtaataaatgtaaagcactgaacacagtgcttggcattattcatcctcattgaatgttaagttttataatttttattctgtagtttttggaaaacttttagggaaaggtatgtatgtactacttatgctatgaaaaagaaaaaacaaaactatgtgagtgactggttttattgataacaatggtaaattaagaggggttttctatctttgagtctgaatattaggcattaattgaatataaattcagtgatgtgattattagttttatgggtcaatctggctagactactcagttattcatttaaaccttaacttaggtgtcattgttgacatctaaggtattttgtagatgtggttaatatctgcgattgacactaagcaaaggagtttatcctcaatacggtgtgtgggcctcatgcaatcagttgcatggacttaacagcaaaacttaggcttttctgaggaagaaagaattctgcctaaggactgcagtattagctcttgcctgaatttccagacagagagcctgctctgcaaattttggacttgccagcccccacaactgcataaaccaattccttgaaataaatctatatgtatatgatatgtaaagtacttctgctgattctatttatttggagaaccctgactgatataggtgtgtatgaagttatatattcttctttttcttttgtctaattatttgtgatacctcattttcatgatgcaattttactgaaatgaaactaacagctccaaactacatagccaatttctttcagccttgtgacaatttctttttggtccaggccagcaacctgatctcaggatgaggggctaatctctacactggtggtggctggcatagcctaacttatgaagttcacaggacacattgcctgggttctgggtggacaatagaatgaacataaatgccaaatggataatttgctctaaaataacagatatattaagaggccacatagttgaaactgtttgcttgctactctctaggtataaattcagagcatagctaagatacaaaaacttcattgtctaagtcaatatatatttgtgtagtgacggcagcatagcaatttctagaatgaatgtgcaggaggataaattaccatgagaagagatatgactgagagtgtaaatctgcttttatttttgctagtctatctataatcatatggaaataaacccctgatgaaagtgagacaaaaactatgacatcatctgaatttagtgtcactgccttaagctaaaaattttgatggacttccacttttattttcttgtcttcaagttttttttcactttattccttttcttcattgtaaagctttcctcatagcattgtcagaatttgaacaaaaacatctttttatctcatttctgatttaccgtgttctttctgtacatctcattgtgtttactctttagtcaaatttttataattttgaacaaactgagttatcagatacttataagcaatggcaggggcaaattctgcttccaaagagagatcaaccaggagcaaaaaccagcaataactttctaagaacgagcttcccttagagagaccagaaagtcttcatgtagttactgagataccagaacctttaagaaataattaatggccaagatggacttctctcaagatggtggtaacctccatttgtccataaaactgaagactgagcaagaaaggatatctggctatagataacagagctatgaaaaaacaaaactctaacctcaaaaaccctctatcttccacatcaccatttcataattcttggaatgctctacttttgcaaaattgctttttaattgtcacattgttttacttttgcttatctctgcaatcttcaattggtttctcttcacttctctcttaatttttgctttctattttccagtcattcctctaatttgctttcctttccttcctgcatttctcttgcctcccctcccctgtccatttttacctctttttcttcacctattctttgaatttcctttccctattcttaattcttcctcctctcccactgatctgttgtggctttaatcatttttgcttaggcactgaaaatcatccactgactgacactttctcactgaaaggagagggatttgtgactggaaaactagctacaaagacccaacacattcaatttacagtgccgttctttcctttcttccttggagcttttgcctgggattagagatggatggcttactgcagctcacaatggcaaaacacttcagacctgacttagccccacgaatcacatggcaaggtatatctgagctactatgtttacagtgattgctagatttttaaaattgcccttcactggaaaaagcttattcaagtctgcctggaaaacaaagcagtgctattttatgatgaactctgatgaactggactcatctccttggcccatttatttttgttccctgtccccaccccttcattttttacagcatgaaacaaaaacacacaaatgggttcctgggagaagggtgcaggagctttggctgggttaccctggccagaggctgctgagactgttcatacaatgccctcaatcaagcaggcctatttgaccagaagtaagagctttacaaagggagaacagcaaaacagcttcttcaggactatatgattttatcaactggcattattgtcaggaaaaccttagataaatttgactctgagaagtttcactttagctctctgaaacacttaagtatggactaccctgctttttattttatgaaatcattcctttttataagtttggctgtgaattcactttaccttttggtgtttcttgaagagcaggagtgcacacttcaatgattaagagcttaaagtaattctctgcctgcagcaggatctgtgagatcgttattatcaaaggatacttgtggtcaaagctataccacattctgaagagccgagcactctctgctttcgtcatgtttttatccaagttatttgcttcctaggggagaaacaatagaaaaaggcattgggtaaatagtcaaaaagattttaatataaaaatacatgtcaaaccaagttaaatttaactacatttaaaaaaaacctttctaagtataggcattttcatctaaatggtgaagcagtttccaggcaaattagctcataaatcttgctatgtggatgagacccttttggagtatttcaacatttacttttcttaataatcccaattttattaaatagctaagaaatgctattttgacatcaataaaaatgacatttctgccatagtgctgttgtgggaattttacagtttatttctgtcaaatttggatgatatttatttatggattaccaaaaggtcaaggctaaagtgaggataatagtctaataagtgttatgctatattttattcattttgtttgatagattattaccaaaggctattggttgatttttgatatatttctgcctagattatgaagagttttgaaatagatattcctgataagaagattgcaacaattgaatgtgcttgtctacctctttttttctttcccacaagggccataaagggtgagaggatgataaggaattaaagacaaaagaggaagagaaagtgtttgatgggtgtttttgtgagagaagaggatgaaatgtgaaaaaaaaaaaggaaagaaagtgaatttttttttgtgagctttagagacagataataaaatgtaaggagggtatccagtggcgtttttactgtattccattttgtgtgttaagggaatttcaatcagttgtaattatccttatcattaaaagcatttatatctcttaatgtgggctttgttgctatgtctggacccccagttttcatgcccaagttgtgtcatgagttgcagtctggtagtaatatgaatagtcttctgaggatgtaatgacccacggaagacaatgaaagtctactggatgctccacagccagcccttagatgagctcatattgatttgctnnnnnnnnnnnnnnnnnnnnnnnnnnnnnnnnnnnnnnnnnnnnnnnnnnnnnnnnnnnnnnnnnnnnnnnnnnnnnnnnnnnnnnnnnnnnnnnnnnnnnnnnnnnnnnnnnnnnnnnnnnnnnnnnnnnnnnnnnnnnnnnnnnnnnnnnnnnnnnnnnnnnnnnnnnnnnnnnnnnnnnnnnnnnnnnnnnnnnnnnnnnnnnngctgctgtaggtatccttttttccttttaacatggaacttacctgcaggtagaaagtagaattgtggttaccagaggctgggaagggtagttgtgaggggaggatagagagaggttaataggtacaaaattacagctagataggaagaataagttctagtgttctgcagcactgtggggtgaatatagttaacagtaattcattgcataatttcaaatagctagaagagaggattttaaatgttcctaatacaaagaaatgagaaatgtttgaggtaatggctatgctaattaccttgacttgatcattacacattgcatacatgtatcaaattatcattctgtaccctataagtatgtacaattattacgtgccagttaaaaattttaaaattaaaaaaaaatctctttgaaggaaaaaaaagatggggcctaatttctcttcctgttgggtgtgggtcatacttaatggctcatttttcataaatagaatatagcagaaatgatggtgtgtcatatccaagagtaggtcataaaaaggcattgtggctttcttttttgctgtctctcttggaccatgtgctctgagaaaagtcagctgccctgttgtgaggacgctcaagaagctctgtggagagatccatgtggaaaggaattaagtatgcctgccaatggcaagtaaggaacagaggccttctgccaacatggaagcgaatcctctaggcccagtccagccttcagatgattctaactttagctgacatcttgactgcaacctcatgaaagaccttgcatcagaaacactcagttaagttgctttccaattcctgatccatagaaactttgagataataaatgtgggttgttttaagccactatattttaggataattttttatgcagcaatagaaaattaatacaatgatatactggaataataaattccagatgtgaaaggtattgaaataacgatttggaaagagataataaaatgttgaggcctacatttgcatagctctttacagtttatgaactgttttcataaaagtaacatttgtggtatagaagacatatgttccctcttaaaagtatatcaaaaactatcctgggtcaaatatacccatcttacagattgaagattaaatacaaagacaaaaaatgatggaccaacttagagagaggaggaagttcacagcatctcactgtacctgcttcattgtattcttaactaatgcctgacacatatcataattcagttggtgtgataactcttttatatacatgtacacaagtatatgcatgcgcgcacacacacacacacacacacacacacacacacacacacacaccctaacaaataattttcctggaacaagaagatcctggttcatgctaataacaaaacccagaaccactactgccatagtaaaggtaagagtctcacgtgtagatttgtgattccattatttagtattttgtatgtgtctaaaaacaaaggaaaacaatgtgtctccctacaaaaccacttcatcatcgctttcacaatggctagccatgatagaataactggatcataaacatatgataggattcaggcattggataactggcagcaaaggactgtgatccttgaaagaagggaagaaatgaggtgagccctctactctccttgacttgctgcctgtaagtcattctcttgaaggtaaggagataaagttcaagcagagaacagcagtctcactgagttgaagagctagagatgggagttagggtaccgctggagtggctgtgtacagaaaggaggaaactgcacagagaggacacccagaagtctgtggagatgtttcccttatgtccttggttgaacactgacctgtacatgcacaggttgaggttcacaaaggcttgcagggagaaactcttgtgaaattgagaaataaatggagagattaagatcacatagtgctaagaaacactgcagtttggtccagctaaagccaaaagtcagctattctattgagacctcagaaaaaaagcatgttttatgagtaaggacaatgttctagaataatgaccatgccctaaaaccgaggatgaaatgaaaatgtatcaaggaaggcaagcatagaactaaggcttacaagattttaatggcttgactgaataaaattcagcaaactttatagaatactccacactccattcaatgtaatattcataagacatagcatatcataacaactgctagacatgggaggaagcaggaaagcatgacctgaagccagaagaaaggtaacctatagaaacagaacttgaaatgactcagatgctggaattaacaggcaatggaattaaaatactctaaaaaatatggtagggaatttaaagacaaagagacaataaaaacacaagtgaatatttcagaaggatgtaaattgtattaaaagaacaaaatggaaattctagaatcaggcaagggaaggaaataaagggcacccaaattggaaaagaagaagtccagctgtaactgttcactgaggatatgattgtacacctagaaaaccctaaagatccctccaagagacaactggatttgataaagtaattcagtaaagtctcaggttacaaaatcaatgtacacaaatcagtagcactgctgtataccaacagtgaccaagctgagaatcaaatcaagaactcaatcccttttacaacagcttcaaagaaagataaaatacctaggaatatacttaaccaaggaggtgaaagatctctatgagtagaactacaaaaacactgctgaaagaaatcatagatccaaataaatggaaacatatcacatggttatggattagaagaatcagtatcacgaaagtgatgatactgcctaaagcagtctatagatccaatgtagttcctatcaaaataactaccgtttttcacagaattagaaaaaacaattctaaaattcatatggaacaaaaagagcctgaatagtcaaagcaatcctaagcaaaaagaacaaatctggaggtatcacattactggacttccaattatactaccaaggctacagttaccaaaacagcacggtactggtataaaagtagatacatagaccaatggaatggtctaaatggtgctgggaaaattggatagccacatgtagaagaatgaaagtgaacctctttctctctcaccttataaaaaaaaactgaagatggattaaagacataaatctaagacctgaaaccataaaaagtctagaagataacctaggaaaaactcttctggacactgatctaggcatagaattcatgactaagaccccaaaagcaaatgcaactaaaacaaaaataaatggggcctaattaatctaataaacttacgtgtagcaaaataaattatcaatagagcaaactacagaatgggataaaatatttgcaaactatgcatctgacgagaaactagtgtccagaatctataaggaactcaaacggatcaagaaaaataacaaataatcccatcaaaaggtggacaaatgacatgaatagacatttttcaaaagaagaaatacaaatggcaaaaaaatgtggaaaaatgttcaacattactattcatcagggaaatgcaaattaaagccacaatgagatactactttactcctgcaagaatggccattattaaaaagtcaaaaaacaatagtcattggcctgaatgtgatgaaaagggaatgcttacacactactgatgggaatgtaaattagtacaatctctatggaaaacagtatggagatttcttaaagaaccaaaagtagatttaccatttaatccagtaattccactactgggtatctacccaagggaaaataagtcaatatatcaaaaagacacctgcacatgtatatttattgcaatacaattcacaactgtaaagatacggcaccaacctaagtgcccactggccaatgagtggctaaagaaaatgtggtatgtatataccactgaacatttctcagccataagaaagaatgaaataatgtcttttgcagcaactcagattgagtgagaggccattattctaaatgaaataactcacgaatggtaaaccaaataacttttgttcttacctataaatgtaagctaagctatgggtgtgtaaaggcatacagagtgacataatgaaattgagagacttagaagagggaggttgaaaggagctaaggattaaaaaattacacattgggtaccatgtataccactccagtgatgggtgcactaaaatctcagacttcaccactatataattcatccatgtaaccaaaaaccattgtatccccaaagccactgaaatagtaaaaaaaaaaaaaaaaaaaaaaaaatagccattaaaaattcctggaaccaagaagtacaatatttggaattaaaaatttactagatcagcttaaaggcagattggatactaagaagaaagtgtcagtgaacttgaaaagagatcaataaaaattatgcaatttgtaaaacacagagaaacaagattaaaatagactaatacctaagtgatatgagaaaaaaatattaagtagcctaatgtatataagattggagggctagaaagagggcagtaggaacatggagaacaaaaatttttcaaaaagcaatagttgaatatttcccgaatttgatgaaaaatatcaaccaagagttccaagaaattcagtgaacccaaattaggataaattctaagaaaactaggcatataagaatcaaacttctaaaaaactagagataagagaaaaatctttaaagcaaccagggaaagacagagcatattatgttccaggaaattaaaaaaaattcaaatgacttttatcagaaaaaatggaggccagaggccgggtgtggtggctcacacctctaatcccagcactttgggaggccgaggtgggcggatcacgaggtcaggagatcgagaccatcctggctaacatggtgaaaccccgtctgtactgaaaatataaaaaattagccgggcgtggtggcgggcgcctgtagtcccagctactggggaggctgaggcaggagaatggcgtgaacccgggaggcggagcttgcagtgagccaagatcgcaccactgtactccagcctgggagacagcgagactctgtctcaaaaaaaaaaaaaaaaaaaaaaaagaaaaaacatggaggccagaacacaacagaatgtgattttcaaagcattgactttcaaagaagacaaccatcaaaccagaattctatatccagtgaaaagcatattaagcactatttaacagataaagaaacaggaaaattcctaattataattggaggttttatgttaaatttttaaattatttttcaaaacaatttttttgtgggcacataataggtatatatatttatggggtacatgagatgttttgatacaggcatgcaatgtgaaataagcacattatggaaaatggggtatccatcctcttacatttatcctttgaattgcacacaagccagttacatactttaaattattttaaaatatacaattaagttattattgactatagtcactttattttgctatcaaatagtaggtcttattcatcttttctattttatgtacccattaaccatccccacctttcccactgccccaaacacctactactcttcctagacacttctaaccatccttctactctctagatccatgagttcaattgttcaattgggggttttatcagtaactgataaaataagtagacaaaaaaacaagttgacataatttacacttactgagctatgccaactggattctgcagttgtttggtatagtattgaaacagttgcaagaatacacattcaagtacacacggaatattcaccaagatatatcaattggaaccataaaataagtatcagtacatttcaaaagtctgaaattgtacagattactataaagtccaaaactgtttacattggctcatgtgacctatatggcagactaattgcattagaggtgccattttttcaaccctgtatctatggccttttccatgtaaatctgcagttctttttgaccaaataggagtcatttattcatacacctgttttttaggacgacctcgtaattttctctggtcaacagaatgtagcagcaatgccaatgtatcacttctgatgctcagcctcaagaaaccttgcctgtttttgcttacattcttgccctctgtcatggccaggagaaagacctactcagggtagccccctggtcccagatgagatgagaatcatgtggtgcacagctaaggcacttaagtcatccctattaaggttatcctagatcagctgacagctctccaactccagacacatgagcaagcctagctcagatcagcagttatctagcaaattgtagctgaccctagatatatgaacaagtccactatagaacaactgaaccccacagacttgtgagataagtatttattgttcacgcctctgagattttgcttgttatgcagcattgtgtggcaacagataactgatcctgcctatatctctgactcatagcttatagtattcttggtggctcactgtagctatacttgcacctttgctatttctcaaacaggtaggcatgttcctgcctcagggcccttgtcttgtctagtatggtcttcctttagacatctgcatgaataagagctaaagactggctggcaactcaacccttgctgggaggaagtaacaagcagagaatgatgcaggttgaccctctcctcctgggagacagtagagcctgctgcactgtgagtgaaggatgacacactctgcagtaggaaaagacctcctagacaacgggcccatactcacagcttactgggtttgggtgaagggaacgattccaaggatgaggaatatactctagcctcttgaaatgagaatatgcttgatactctcgatagggttgggaaatgaggctggccaggagttaacagggaaaggattactcaaatgttaactgacaggctatccttactgggaagaaagaacacgtttacagattggatgtggtgcaatggtgagaatgaaacggctttggcctttagttctggctcagcccatcactggtttgttgtcttgggaaaattaattctttgaactccaatttcaccatttgtaaaatgggagtgatataggtatcttgattggtcaaggtaaagattaaatgtgattatgtatatatacacataggtatataattgttaatcacttaatatataaaaatgcttattaaagtatagctgccaccttccacttcttcttccttattatcattcctactttctagaacatgtacttgcaggaactaccggtaagataaaaatatagaatttagaatttagtcctatgcagtaaaaagttagtagggggaggacataattttgaatctaaaagccataagtaagtataaccaaaataaattcaatgttggccaagggaaaacccaagatattttctctgaaatgtttattttatttttctcaaaataccattagttacaatgacattggaatgacataacattacaaaagctctcacctgggtcacatcaaattttgagactcgtattctatttctgaaatattcgtagaagtgtagtgtgaaatttacactctatgagactaactccaacagtacaggagcagtaaatgcagaaagtatggaaaaatgttgataactgttaagtttgggggatgggtatgttaagattcattattctcttatctttgtgtttattaggaacatttgaaaatattcacaaagaaaaattttatttaatgaccatgatgaccccactatctgctaaattaatctcttcccttcttgaacctacttatatttccaactcttgcaactctggaaggccctgaataagaactatcaattgtgcaaaagaacaaatacttttattattcacccatggcctcttccaggcttcaaaggtattccaggttatggttttctgggagttagcaaacaagtcttcattcgctttacacctttcatatttttacagatactttgttgtgccccttcgtagttctagtctttctgatggaaaaatcctaatccttttaatccctgctgctctggcagcaggtccctctgtcagttattgaagttgcccttcttcagacctttctcagctctgctgactttcatgtgctgcagtgaccagaacggatccacccaggttacacacaagaataaaggacaaccaaaaccagaatttcaatgaagggactttcagaaacaaaagaaaattggaaggtaacgtcgagaaaccattaagtaacaagcatagtgttagaaaatgaaattgtatgaaaaaagatgaaaattatcctcatcacaacagctggcagggtggaatggggagaaatttattttaatgggctaattctattacttccaagctccaaaccaaaccatcaagggtgtctatcacattagaaaaaaactcaaacctaacaccatggccaatggtctggcccctgcccctgtctgtttctcccactttttctccatccgctcccaccttgcttactcagctccagccatgctggccttcctgctgcttttgtgcacaccataacccactgtgactccaatgcctccatacttgctgtagcctctgccagactacctctcctcaaccccttctcacatggattgtttcctccacacatcatctggcctctgatcaaatgccacttctaccctgaccaagtagcctcctcgcctgttctctatcctctgacctgctttactgtgatcatgctttgaatgtatagaatgcagtttacctttttcttatcagtgtcccccaatagagtatatactctgggaggaagagagctttgaattggtaactcctgaatcctcacatctacgttagtgccgtaggagtgggtaccaagaattacttgtatgaataaatgaatgaatacatgcacgcataccagttaagagtggaagctctggaaccaaactgtctgggttcaaattccacctctcccttctgtgtgttcttgggcaagttttgtctctgtgtacaatttccttatttgtaaaatgcagataattatagtacccactcagggttatcttggaaattaagtgagcaaacgcatataaggtgctcagagcagtgttaagaataatagctagtgcccaacgaatatgggagtgagtacgatcaaatggcaaaagggaaaaagagaagcaatactggcagcctttcttgagtagcaggagttttctattaaaggactgaaggcaagtgtggtgctccagtgactctcacctactctgaaaaggtgtgctttcaagtacaaggaatcaattacaagggaaacttcctgttgtgtgggaggctacctgagggttttgtttttcacatttaagaggcataaaattcacaactgcagtatcttccagttctcaaattagcacgtttgcatgaagtatgcatccagagtgtgatatctgcatatggaacatgctctctaaagcttttgtgcctggtacaaataattgtgtaacaccattcacattctaaaggtattgtatggcaaaaaggaaagttgtgacattactagttagccacagctacaagttcacattcccaaaagttattttactttccacagcagagaacaaagaagaaatttaaaaacatattaatatatataattttaaatatatatatatagtttattcttgattttgagagtgtataatcagtaacagctataactacctgcaaaatttttagcctttggtaagtaagaagggtttctgtgtatgtgttaaggctgcccattacaaagattaacctatttgttaatgcaaacccagtttaataaatgcaaatcaaggggaaacatacaatcctcctaagaattggggttatgttacataatccaacagagcaagagatgttgataataagacaggtgttgccaggcaaaatgagagcagagaggttcttgacagtttgggaagtaccaaaaaacggtccaggttcagtggcagctgtgaggacactgcagcttgttacctcccatcagagcccactgtttcctgtacttgatactgaagataagcattatcccaatgtgtggagaaaacctctttctgaaacgtaagttctttggtaatcgaacattatcatgaataagaacacttacagtatacttcttaaaaatgaaatcatttgtaggtagcagcagttcaggaggcgccatgtcaatgataacgctacttacttaacatttagatagtgctgtatgtgtcctctacaggaggccccaagtgagaaatgtctttaaaaacatagtgatgtttcgtgtcacttgaggagagggtattatttttccttctaatgatgtgaatttaatatattaccaattattatttctttatttcccctttggccatcagaaagcttacttatggtttgactacagtaagtctataaggccttatgatctgcttatccatgattctttatacccctctggttttgactatctgctcttattaatattttttactgatttttaaaatttctataaaaatatgttactattatatgtggtggtttaagctgcctccaatcatccataaaatgagatgggtttagcttaattaagttgggtcattttcataaacccaatttcccttgattatcataaataacatcctggagaggcagacgttattatcatttacattttatagagagggaaactgagacccaaaggtgtaaacaccttgcccaagacccaaatatcacagaattttcactgttctatgttatgctatcctatttctctaataaaaaagtaactttaattgctataatatcttcaggtaagggttattactgatttaacaatgatgaactttgttttaaagtgtcacatgaatgagataaaataaaatacatttaaattggaaaggatttaggctagtaggaaatttttaccaataacagtatatgtgattgtagaatattaggcagttagaagaagacagagaattttatttgatgaaatttataattgtgtcttttcttcttttaaagaaaaaggtatactagaaggacaaaatttagatataagttttcttgaggtaggagaatgaattatttgacctacacaagatgaaaatgctttttaaaaatcagccaccaccagacattactgactattcattatagcccaccagtgtaaggagatgggctttgatctcctttctaaggtcaccaggctggctctaatcccagtgctttgggcacccctgctgtgctccatcctgcagttaggtgtgtttcctggacaatggagtctgtggaaactgcctggccttggaacacatgtgacaaaaaacctcaaagtacatgagagccaggatcatcaccaacttaatttcccagccttttccacagagcacaggctcctttctttttcacatctgtgtgtgccaggaaagcagtgtcttgcccaggaaaactcaccagttgtgcctcattgatggtgttattggaaaaacaagcatgaaataaaagagagggattcccttagaatacaaatacgctcataacacaattcattaagcaatatcacttatttatgatattctcctattatatctatgtctgcctacttctaatttcagcaaaaaggtgtaaaatttccctacattttcttatttgtgacaagtactgagtttaaaatggtagtgcaaaactgacattgatagattctactttgacgttaggttcaaattcagtttggagaatgcatttcccctacttgaggtgatatggtttggctgtgttccactcaaacctcatcttgaattctaactcccacaattcccatgtgttgtgggaggaacctggtgggaggtagttgaattatggggatgggtctttcccatgctgttcttgtgacagtgaatgggtctcactagatctgatggttttaaaaacagtttccctgcacaagctctctctttgactgccaccatccatgtaagatgtgacttgctcttccttgcctcctgccctgattgtgacgcctccccagccatgtggaactgtaagtccattaaacctttttcctgtataaattacccagtcttgggtatgtcttcatcagcattatgaaaatgaactaatatatgagggaagaactcattgttctaaacaattaccccaaaggattttcaggtctctgtagataattgttgctcaattaagtcaaaggatggatcacctagacagttttttgggccttagacctgataaatgagaagctatccaggagaaataagtcaatttgttgtttgtgcaacatgcattggacatactttgtgtaaatttcactgagttggctagctagcaagttgctgggtagggatttgaactatgaagtgcctcattccaagagccatcatatactttgtaaagtttccagacttcctgctgccatagagaggcttgcaagtacatgctagttctaagcattcatatgctagaagttatcaacaccctgaattcccttgtattttattgtaatctcatttgttttatcagcagaggaagctccgtttagaaatagctccttggtcacatgctggacaaacatggaacagcctatggaacagaacaatcatatctctatataatgtgcattggtttctttgacttgcctggtgttgtgaggaggggtcctccttcagattttcatccaggtccacgccaactctgttaaacaaaaccaaaaactggtcaatcccctgctgcagaaggaatgagacagtcttgtgtgtcagatgacctaacccaaacacaatgtgaatctgagaaaagatttggcagaaaactatcctacgtcttcttgaatcaaaagaacctcagatttataccaaaataagaacttgaacagctgggcctcaggatgctggagaaattaagcatcaacagcagctcttcactactgtcgttcctggcaaggtaagcatccctgagaacctaggacagcagccatcaggaaaaagacctccatagccccaaaaacacacattctggaaagaaggtgacctggtacctctgcaaccaaccattgaccaaaatgccctgggaatttgtgtgcccagcctggagcagggtttcttgaggcagagtaaacagaacgtttttctagagactccccatagggaggattcagactgtggagcctgaggcatatacaatttgggggctctctctttaaggaaaataatacaaaaatataaacacaaaattgggagtgaaagtgactcttcagaaggataagttacaaaaaaaattacatatgtttttaaagctggcaaatgcaatagacctctcaaagcccaggaaaaatacaaaacattttaattaattagctgtctgacacactgctaaaataactttcttccggaatttttgcctactgactttgctactctctttatatgataatgattttgtattagagaataaaaagataaggcagtctttcctctagcaagactgatcaaaattgttgatagttggaaggcattaaagcactctttctcacacacagacacgcttgctatgtgcctcactgctacagggtaatgccctgcaaatgcaagatttctgataatttttattttatgcaattcccataagcaatgcacagtgtacttatcagtgtacatgctttgccattgaatatattcctgaatttccattttgatgaggcatcaatgaaaactgcattttatacatctcatgattagaagaattttcaacagagtccccagtctggctcagtccatctcaaaccttgtttttcctccactacccacagacttctgatgccaggcaccataggacacgtttatatttaattcagccttgtgcattattcctgtaagctgttcctactccggggtggacagcagtggcttagccatgcacagaagtgactgcagcccacacaaatgtatcgcattcaatctaaactaaatgtactctcaattcagcttccccttagttggatcccccaaatgcccacagctattccaataccatttgatcagagaagtatgaggaaaaggaagctgtagtggaaagaaacagcagttgaacccaactgtgttgaaactatgtatttttttgcaaatcttacaaaaatataagaccatgggaacacagtactggggatcttcccagggccttggagggccagaccaagtgaggggccctgaaactcaaacttcctctgtttccagagagagtccctctgcctgcttcagctggagtggggcagggtgggagtgctggggagaggtctggcccaagctccaccagagcccttcctgtgaatccacatttgctagacatttagggacttttcttcaactcttgttcctcataaacacctccctaattatctcccagtcctgctgttggggtgggggaagcaaggccatgtgagaagcctccagtcaagcaaatgtgtaactccttataaggagaacagtaacggtaaagtcccgcctgtttaaaatacctctgattcttcacaggtaagtgtcttctggacatgaatagccccatctctctaaccaagggaacaaattaatagctatttattttgtgctgaattttttgcctttaggttactgggaagagcctctggaggggaggaacctttgattcttggggtagaaaaactagctatttgattgatgtcatctgaggaggaacaagaaggggaaggggaggagagggaaaggatgtcagtgaggagaaaggagaggggaagggatgaggggagaacagcagtgtagagaggggtgggggtggcctgcctccgacagtgggacccaggtgtggaggctcccagcccccttctcttatggggccaggccactctcacagctgtgtggtggatcagagccctccagcaggtgctggctgttccctagaggcttcattgctggataaacccagatctcagggatgaagctgctgggcacccaggttggccgtgaactgaactgaggatcatggggctcccaccactgtatctgcttagggcctttttctaggtctctgtctagaaacctggagaggacagaaatagaattttataagaagcccaacatttaacgtttgaggcagcactgaggcctttcactaaagtggaatcttttctttgcagcagcaatcagagcagacattcctgcacaactagatggggcagaggaagtgatgaaattctttcatttgatggggactcagtggaaggcatctcagagacctgactgggaagaagactgtacctcctcccacatctcatctcagggcaggtccagagcaggacaaacgccacaagtggcttgaggaaagagaacctccatgaaaggtgtttccctcctggggaagccagggtgaacacggtccttgcccacacagggcatacgattcgggaggttcaatgaggataatataaaaaatgtaccacagcttaagggccatgaaggaaacaatgccttctttcacttgtgatattagctgcttttgaggaaaatctggctaatatatgtttcttggctacctgcctccttaaatagtgtgtaagggggatattctaatcttaactggaggactcagcattgcaactggtcccataaagtctgacacttgcttctttataatgatttccaagaggtgtatgaacctttttatgatcacgttaaatggtccctgactactgtctttttttttcaaattattgtatctgccagttagattgcctttatttttcctgactgtaacaatatgttgacatattgtccctatgacccccacccctttaatttactgtaggactaaccctgacagtcaaatttatttttattttcattttctatctatctatctaatttaaatattatagaaaggcttacaatcacacacaattgttctcataatacccttgcaccccttcagaccaactcccattgccttggagggcaattttctgccttttctcaattgtgatatataagctgacatagacatgcatggcaccttcacacagcatcccaaggggtatgcaaacatgccaactacatctgtatctcttactctcctcttcaagaaagcaagtcagaatatggaactgacattattttagggctaaccatgtatccattcactttaaacaaatttttacagctctttttaatgcatgagcatccacttttgtgcacaaaagatcatttatacgtaatgagtttttgagagattagaaagaagacataatattgtcccagtttgtggtgttacatgtatatagcagccccccaggtgagatcacagtatgaagtccaacctccttaggtgacatccaagggtctttagcacctctccctcaatgttaagctagccaccctttctgctcacctgatctggacagtgtcctgggtccggtaactggacttgtccttgtttctgagccccagcaccaaatacagtccctgagctctggccatacaataatctgccagtttctctcccatggactggaccccctccctccaaactccaggctggtattttgggccacgctggctaccactgaacttgtgcgataccctgccttctttcctgaactccaagcactgtcctcccttctgtctgatcaccaccttgtcccatccaccacgatgcccttcctaggtctcagatctcccatcactagaagttactgagacttggagtgaagtagctgtactcctcctactctgctctctgctcccaaatagaatcccttctgggcactggagatcaccttgctctgtctttggcgaccctggctcaccctttgctcacctgtctgtttatacccaggcatgcagggcaagctctacagtatacatcggccctagctggaatctgatgacttcatgattaccctgtagttgttcaagggtcagtgaaacccagatgtcaagagagttgtttggagccagactacctgggttgaaaaatgtggctctgcctctcacttgctctgtgacctgtgtcactcactctgtctccatcttggtttcctcaccaatacaatggggataattagagaactcatttcacagggttgtggtgaggattaagtaagaaaatagcttaggacctgttatatagtaagtttttaagaatgttagcagctattattgatattattatttttcagtacttatcagtggggccagagctcagttactgattactttcagagataagccctcctagtccttgtttctgcactggacaacctttgaatatatagcaaccaccacaattgagccacaaggagcagccagtgtacagcaaggatttctggtctcatagcaaaacattatttctgtttaaagagggccaagtttcccaggttttgatttttttaaaatttatttcttttatttttgagacacagtctcattctgtcacccaggctggagtatagcggtatgttcttggttcactgcaacctccacctcctgggttcaagtgattcttttgccttagccccctgagtagctgggattataggcgtacgccaccacacccagctgatttttgtattttcagtagagatggggttttgtcatattgcccaggctgttttcaaactcctgggctcaagtgatccatccacctaggcttcccaaagtgctgggattacaggtgtgagccactgtgcctcgcctggtttggaattatttataatttattggtagactagttagggtaataaggcaacaaagaaggaaaagaaggtgtctgaagagcaaggagaaacaaggaagagggaagagctgagcagaaagcaagaaaagaaaaggaaggtgaaaaggaaagatagagaaagaaatacattactataaagaataggtgcccatcgtggataaataactgtaaaggtgcatgcagccttagaaaaggtaagccgagggtggagggaaaatatagaaaatatagagaaataaatatagaaaaaatatagggaaattaagaaccagtaaagaattagaaagcaactaaaaaaggctggttaaaattttatatgatgttttgcattcctgatgtaccttttaattttaagcaagttgagtgctgcctctatggtattcaaatggaaatgaaggcaagcattgcacatattcccagctgtgccctcgtacatctcactccgggttcctcatttacaatgagcatcaagctcaattttcagagcaaaacacatctcttgtgcaccataatgcaccctcccttcctattgcacttccactctttggtgagttttattagacatattaaaatctcaggatgctcttatacccaaccatagttaaaaaaaaaaaaatgacccaaagttgggtttttcttagagggaaagcaaggtaactaacaaaagcctcacttttccgctaaagccaacaacttccattctgattcttaccacttagcacctccaaaaaggcactgaaatactactagggcttagtttcattgtgtgaattccaatagtcttaggtgcagttttgattcttttgagccccctggtgacaggggctgggtggtgggggaagatacattatttcctctaagacctgcttttgatggcaaagtgtaaaaaaatgacattttcagtaagggaagagtggctggagattgagcacataaatacagcttgacaatggaggagtctgaaagatacccactaaggtttggggactattgtgtagccatgagaatatcacttgggggccaacatctgctactgaaccctgtattatttgactaaataatcctggagtttgtgtaagaccaacattaatacaattaataattcaaatattttaattttgttttgggaaataagaaaatgaactaaagtaagtgaaaaaactcagttcattttgttatttaagtgtggcacagtagttaagaatttagatcctggaatcgggttgcatggattcaaatttcacttccattatttgctacttctataactttgagacaaattagttaacctttgcaaatctcagttttcccaactataagaggggataagcatatatatatttcatgagctattataaggatgaaatgagttaataaaatacataaaatattggctgccatctaggaagcactcatgaaatattagttgatgctctccttgttagtgctgttattataagagaaatgtgtgcaccctacattgagtcatagatacaatataggttaaagacaagagcggcttttccataaatgacagatgctaggatataaaggtcaatgataggattcctgccatcaatgacccaagatctaatgggaaaaacaaatcggaagcaaagaaccacagtatggtgtgataagcattgaacattaattatttgaacacaccaacaaagagcctgatcaagatgagctatggagcaattaggtacgtttcacagaggagatggacactgaaaagtgagaatgagtttaatggtaagagaaaaggttggggaggggactccaggcacggcatgggcaaaggcataggggaacaaagtaggttggaacatcataaatagctctgtgtggctagactgtgagggtcatgaacacagaggtggacagagttgctttggatgacaccagaaagtaaattaaggccaaattatgaagaatcttgagtgctatgcttatgcttttgtttctctgtaggcagtagggggtgaaataattacatttatgttttagaaagatcactggaggtatacattgtgatattaagaaactggtggttgtcttcaggttgggagagaaaagaaaaaaaaagaaactggaggcatggaggtcatttagtagtctactgtaatggtccaaccaagagttcattagggtctaactaagttagcagtggtggaaaagaagagagagatttcagagatatatacatgaagcggtggtgagggccattgtgcaggacaggctcactgtgggaagaagtggaaagtattgaggtgtttgagtttctactccagacacttgaatggtttgccctaccattagccatattaaagaaggagaagcatgtgcctgggaatttcccccaagggacatcctgttaaaagataaaaccgaaactcagggtcagtaagatcagatctgagcacttctattgtgagagaagcaaagtcagctctctacattgttatcaactcaagaaaaatagcaaccccctcagagttttgtctagttgcttgtctgaagtggagattctgaccaaaaggtaaagtctaagaataaggaagggataatgagttcttcaaggtcaagatcaatggactgggaatattcatggaagctggagaagggtgtggcatgtcaagtatgtaaagacagtttggacgtcttatttaagaagggttagagggagaaggaagaaaggggggttctataatttggggacatgaagtatgtaatatgattgtaagcccctccatgggagatgcagatgcagagctgggatgctgctgagagcagtggtgcccctctgggtttccaccactgcatggacacactgtcattgacaggtactcatatgctttgctaggtccatttttctacccctgggacttgtctcattaccaaattgaaaacagctgggtcaaggattcatgcaacattcctgtcctggtattccaaggttgcccatatgccatttacttttctcctagacattatggaggtgggatggatttcatgaaactctattgggctgatcagactaaagaagggtctggtctatctttaactctttgctgacacagttgactgaaattactaggtaacagctaagaagaggcacagagcatgaacattaggagttagacattctgaacggctgttcctatcacttacttgtgtgactataggcaggaaactgtacctcggtttccttttccacaaaacggagataggaatggtaaatatgtcataggctgttgtgggataatacatgtaaggggtgaattgttccaagatggccaaataagaacagctccagtctacagctcccagcatgagcaacgcagaagacaagtgatttctgcgtttccaactgaggtaccaggttcatctcactggggcttgtcggacagggggtgcaggacagtgggtgcagcacaccgagtgtgagccgaagcagggcgaggcgtcgcctcacccgggaagtgcaaggggtcagagaattccatttcctagtcaagggaagctgtgacagacagcacctggaaaattgggtcactcccaccctaataccacacttttccaatggtcttagcaaatggcacaccaggagattatatcctgggcctggctcagagggtcccacacccacagagcctcactcattgctagcacagcaggctgagattgaactgcaaggcagcagcaaggctgggggaggggtgcccaccattgctgaggcttgagtaggtaaacaaagcggctgggaagcttgaactaggtggagcccaccgcagctcaaggaggcctgcctgcctctgtagactccacctccgggggcagggcatagccaaacaaaaggcagcagaatcctctgcagacttaaatgtccctgtctgacagctttgaagagagtagtggttctcccaacatggagtttgagatctgagaacagacagatatgcctcctcaagtgggtccctgacccctgagtagcctaactgggaggcaccctccagtaggggcagacagacacctcacatggctgggtacccctctgagatgaagcttccagaggaacgatcaggcagcaacatttgctgttcagcaatatttgctgttctgcagcctccgctgctgatacccaggcaaacagagtctgcagtggacctccagcaaactccaacagacctgcagctgagggtcctgactgttagaaggaaaactaaaaaacaaaaaggacatccacaccaaaaccccatctgtacgtcaccatcatcaaacaccaaaggtagacaaaaccacaaagatggggaaaaaacagagcagaaattctgaaaattctaaaaatcagagcgcctctccccctccaaaggaacacagctccttgccagcaatggaacaaagctggatggaaaatgactttgacgagttgagagaagaaggcttcaaacgatcaaacttctccgagctaaaggaggaagtttgaccccctggcaaagaagctaaaaactttgaaaaaagattagacgaatggctaactagaataaccagtgtagagaagtccttaaatgacctgatggagctgaaaaccatggcacgagaactatgggacgaatgcacaagcttcagtagccgatttgatcaactggaagaaaaggtatcagtgattgaagatcagatgaatgaaatgaagcaagaagagaagtttagagaaaaaagagtaaaaagaaatgaacaaagcctccaagaaatatgggactgtgtgaaaagaccaaatctacatctgattggtgtacctgaaagtgatggggagaatggaatcaagttggaaaacactctgcaggatattatccaggagaacttccccaatctagcaaggcaggccaatattcaaattcaggaaacacagagaacgccacaaacatactccttgagaagagcaactccaagacacataattgtcatattcaccaaagttgaaatgaaggaagaaatgttaagggcagccagagagaaaggtcgggttacccacaaagggaagcccatcagactaacagctgatgtttcagcagaaactctacaagccagaagacagtggggccaatattcaacattcttaaagaaaagaattttcaacccagaatttcatatccagccaaactaagcttcataagtgaaggagaaataaaatcgtttacagacaagcaaagactgagagattttgtcactgccaggcttgccctacaagagctcctgaaggaagcactaaacatggaaaggaacaactggtaccagccactgcaaaaacatgccaaattgtaaagaccatcgaggctaggaagaaactgcatcaactaacaagcaaaataaccagctaacatcataatgacaggatcaaattcacacataacaacattaacctttaatgtaaatgggctaaatgctccaatttaagacatagactggcaaattggataaagagtcaagacccatcagtgtgctgtattcaggagacccatctcacgtgcagagacacgcacaggctcaaaataaagggatggaggaagatctaccaagcaaatggaaaacaaaaaaggcagggggttgcaatcctagtctctgataaaacagactttaaaccaacaaagatcaaaagagacaaagaaggccattacataatggtaaagggatcaattcaacaacaagagctaactatcctaaatatgcacccaatacaggaacacccagattcataaagcaagtccttgagacctacaaagagacttagactcccacacaataataatgggagactttaacaccccactgtcaatattagacagataaatgagacagaaagttaacaaggatatccaggaattgaactcagctctgcaccaagcagacctaatagacatctacagaactctccacctcaaaatcaacagaatatacattcttctctgcaccacaccacacctattccaaaattgaccacatagttggaagtaaagcactcctcagcaaatgtaaaagaacagaaattataacaaactgtctatcagtttgaccacagtgcaatcaaactagaactcaggattaagaaactcactcaaaaccactcaactacatgcaaactgaacagcctgctcctgaatgactactgggtacgtaaggaaatgaaggcagaaataaagatgttctttgaaaccaatgagaacaaagacacaacataccagaatctctgggacacattcaaaacagtgtgtagagggaaacttatagcactaaatgcctacaagaaaaaggaggaaagatctaaaactgacaccctaacatcacaattaaaagaactagagaagcaagagcaaacacattcaaaagctagcagaaggcaagaaataactaagatcagagcagaaatgaaggaaatagagacataaaaaacccttcaaaaaatcaatgaatacaggagctggttttttgaaaagatcaacaaaattgatagaccgctagcaagactaataaagaagaaaagagagaagaatcaaatagacgcaataaaaaatgataaagaggatatcaccaccgatcccacagaaatacaaactaccatcagagaatactataaacatctctatgcaaataaactagaaaatctagaagaaatggataaattccttgacacatacaccctcccaagactaaaccaggaagaagttgaatctctgaatagaccaatatgaggctctgaaattgaggcaataattaacagcttaccaaccaaaaaaagtccaggaccagatggattcacagccgaattctaccagaggtacaaggaggagctggtaccattccttctgaaactattccaatcaatagaaaaagagggaatcccccctaactcattttatgaggccagcatcatcctgataccaaaacctggcagagacacaacaaaaaaaagagaattttagaccaatatccctgatgaacatcaatgcaaaaatcctcaataaaatactggcaaactgaatccagcggcacatcaaaaagcttatccaccatgatcaagtgggcttcatccctgggatgcaaggctggttcaacatatgcaaatcaataaatgtaatccagcatataaacagaaccaaagacaaaaaccatatgattatcccaatagaagcagaaaaggcctttgacaaaattcaacaactcttcatgctaaaaactctcaataaattaggtattgatgggatgtatctcaaaataataagagctatctatgacaaacccacagtcagtatcatactgaatgggcaaaaactggaagcattccctttgaaaactgctacaagacagggatgccctctctcaccactcttattcaacacaggttggaagttctggccagggcaatcagacaggagaaggaaataaagggtattcaattaggaaaagaggaagtcaaattgtccctgtttgcagatgacatgatggtatgtctacaaaaccccatcgtctcagccccanaatctccttaagctgataggcaacttcagcaaagctcagatactgatgaactacnnnnnnnnnnnnnnnnnnnnnnnnnnnnnnnnnnnnnnnnnnnnnnnnnnnnnnnnnnnnnnnnnnnnnnnnnnnnnnnnnnnnnnnnnnnnnnnnnnnnnnnnnnnnnnnnnnnnnnnnnnnnnnnnnnnnnnnnnnnnnnnnnnnnnnnnnnnnnnnnnnnnnnnnnnnnnnnnnnnnnnnnnnnnnnnnnnnnnnnnnnnnnnnagcctgggccaggcccccctgccagtacgtaaaatccgcaatccttgtctcgccgtgcccgtccgaggttttagacaaggagctttgatgggaagtgtttcaacaactttactctaaacagtatctgcggaaatcgatttttggataattgtatccaagagttttcgcttaaggcagtattctataaaaacagactttaccattatcttttatataaatatatattgaaaattatatttgtataattatataatataattatattttaaataaatagataattataattatattttatataattatataattataattatttttatataattatatttatataattatattatatattatatatcatattatatattataatatataatatatatcatattatatattataatatataatatatatcatattatataatatattatataacataatatattataattatatataaaataaattttaattcaaaattatttacatttgtattaaagcatattatactggaataatcttagactattataaatgatactgtgattattttattcatgtaaaattattatatctctaatttctttcttaggatagattcttaaaaatggaattagaaagtcaaagggtagaatatgttttaaagttcaaaatacattttgccaaattgctttccaacaaggttgaattaacttaaacaccagcaatgtaatctcttctttccttggtggctttccagttgttttcttattactccatgataattgcatgcttttgaggatgcctaacaattttctaaaactttgtcctgattccagaagctcattttttctgggtctgcaggaagatgttcctttttcctcattcagtaaaacatcttgataagctttgtgttaattttcttgtctttgctagtacttgactatagagaaatctttccagactcagtattcgccaatggacaggtgtgtggattgcccctggctcccctcaatgctcatctagttgttcatcacattcttttcttggagccatagctagaggtcagtttgcaacatttattacccagggcccaggatctagcaaacattcatctttcgagctatgccctatttgcacagaattttctgctgtccttaccacttagtttccaggctgtctggccaatgaagcacattctactcctgggatctccacccatggctaccattttactaatgggacacttagtcccacgggatgcaatatgcctttgaaaatgccatcctccatcccccattctttccttcattcattcacatttattcagcaaatattaattaagcttctactgtgtgccagccaatgaataaagcatagagcaagagacagaaatagaacatagaaatccctgcctttgtgtagctgacactacatccctaattcacctttcattcctgccctatgatgtgttgtcataggttttttggtcgatacaagcacgtgttcttcaaattggggtagacagcggggctatgaacaaagtatgtttctgccatctttagacagacaacgatgctctattctcctgtttgcttttctcaaaataaccattgtcagcattatgagtattgaaaactcctgtgatattccacacaagcttgtccattgcatagggttttccgtagtattggaattgtttgccttttctgggccttgaaatggattttagtaggaagttagcaggaacaccattagggaatactaactggaaaccatttcaaatagtgatacaagtcatttgcaaaaaacaacttgccctgttttatttttttaaggttaactttaaggcaatggttttcagagagaaaattattctactggcaacaaaagaaacacaagactataggagtaaatgtattttgtaaaattaatgatataatagtattgtttttgatgttgtgtgttttacttaatacttttgcttccagttctcaacacaaacatttggctaggaatttttttcagtcactgagccaaattctcagtctgcataacccagtagggcaccaaggtgaaatggaaatctggcctgtgtttacgtcttcacaattaatttctcattgggttgtgcagtgtgtcttatagctcccaatgcatgctgtaaaaataaataacaactttataacttcggcttcctccaagtatatttgcaatagatgaggcttagagggggataaggtggtagtttcaagtatgtggtgcatgtcacagggaaacaggaaggcagaatattgatcatggctttcaacacatgtgtctctgggaatcactttgtcacacatataaccctcttctaaacatgcatgtgagtacatacacatatgattgtgtgcacacatgtgtgcatgcacacacacacacacacacacatacacacctaccttatatctcagccatattgaagcattttaatttcccccaaatgtgccacaccacctatttcttcttccatgcctcacactaagagtcagtcatctctcctgagaaccttttacccatcagcagcctcctgccccagctaaggtactttcctgctttgtactcccaccgcattcccacatttcccatcctgatagatcacaccccacagaagtaactcatggttcactaatggatctgaatgacaactttccaccttagactgtgagactcctgagggtaaaagtgaggtctggacctcttccctctgtctctcagctgttagcacagtgcctggcacccagtaggcattcagggcctttaggagctgctcatcaatcatcccgaagtgccctaacccatttaccttcccactctgctgagcaacaggttccaactttctctcctcaagcccccataaccccttccccagccttctctttaagcagatcatctttccaattcgtaagagaatagaaacagtcagaagataacttccacgaggtccccagtgtatctacctcctgcatcagtttccttaaactccaccttccaccatattacaaccgacaaactggcctcactccagttaggcccccccttctacttgcctgttaatcatatcctctctacttattggaagacattactccaatatttgtctctattttccctcatatcattatttgcccttttcactggataatttaaaaacccagattaattacttttattttttaaaataaaacatttctctccagctacagccccattctctgctgtcctttacagcaaaatccttcaaaagagctataattcatagtgtctaccaatcctttcttctcactctttcttaaacttactctgagcagtctgtagccccatcattctaccaaagctgttcttgttagtcttgatactcccctcagcgttgctaagtccaatggtcaagcttcactttgcattttattggacaatcaaaaacttttaacataattgatcttacttgaaacactttcttcacttggattctaagacacactccacctaattaatctcatacctccctggccacctattggctagtgtatatgccagtttttgctgcaggaactagtcctaatatcacaatggtttacaaccataaagatcagtgttttgttcaaattccataaaggtatggtgtcagctacagatctgcttgactctgctgggttcatctgcagctcagctcggcttgactctgtttggagctctgtgccatctgttttctcactcttagacccaggctaaaggagcagtcccatccgtagcatgctattctcttgtagcagaggaaaggagcaaaaggattgaaactcccaaagtttccaagagcttctgctgggacatggcatgtatcatgtctactcacattccattggtcaaagtaaacctgtgaatcacatctcctatgtgaaaggggtaataagttgtttgtcctcatcttaagcccatgagatgtggcttcagtgagaccattgacaagtttcatgcatgtcctcaaaggactggggaaccccgtgatatactcactgtctgactcacatctaagaaatctaaggtgtcaaaaactagctgaagtggtctacaacagcagagtgagccacagcttgagaagttcctacattcccaccaagaatgtatctaaagagtgtgtttcctattgattgacatgtgtgatataatggagagagcctctgtggaggtggcttactttctgacctagaatgttacctgaaggggtgagaagatcacagcagaggaaaaccggggctatggagttagatgttcaggggccaaggcagtggtggatggacacacagtccatatcaggaaactgcccatcagagggcccaggggtagacggaaccctgaagagacctcacaaatgcccacatgggccagcttccaacatccaccacagccaaagggaaatatgccacattcatgccaattgaatgaaacctttctttcccatttacctcttccttttcctctgtcccctcaccttggagaagtcaagctagcaactaggaatggggtaaggaagagaaggaaaataagaagattgccccttcacccctggtggcaggcccaagctgatggggtaggaagactcactccagctgaaatttagggattgttattattacatattactaagctgagactatttatgtgattagaagtcaccagaggacttaaaaataaactatctgagactattaaaaagtcaaggaccccgctccagagtctgaaaaagtaggtatgtacgtgtgtgttggggaaaggtggggcatgataaagttatttcttttgcactccatgaaccacatttgttccaagtggcctaggctgctgtgccattacctgggctggttgcatctgcctgggcttcatgataggaagaggttgcacttcaactttgtggaaacctggcaacttcattaacatctccgactatgagaatataggaggctagaatcttagtttacaattggctggcctcacatttgaccctgtttacataaaggaaatctaggcatctggccaatttaggaccaaacaatttcgtagctggggtgttgagcttcatttccttcttcatttataaatgcagttgaagctgattccaaagcatttttaggaagtcagtaaaaacatttaggcgtcactactactgttttattaaatttcatctgttgttttgaccttgcttgtgtttaaatacggaaataaaaatctgggtgtggccgtgggggagtgaagggatgttaagtcattacaccacctacttatccagtcaggaaaccccaagccactggtccatttcctgctttagtaagccaaggaatgcaatcgtgtcatgtgtgtgactaagggtaacatgactcaggttaagaactgggtctattgaatttgtttcctggccaagaaaactacaattcaattgctactagagttaaatggaaaatatatacttttgccttcattagagctattgctacttctaaagaattgttgggaacataagatcaaacttaaacatgatagcataagttctacttattgtgaattaggacagcccttgggaatattgccttttattcccagctctacgtatgctttgtgttggaccttagacatcatacctctgtccttacacatgaaaaagagactattgctagtcaacactcaataccaggcaaattaaaaatgctcatttaaacacagggtagactactatgatcccttacctgtggatttatttgtttatctagttcttcatttcttaaaatggtacccttcacagaagcacctcagggtacaagcagcacattaaaacagtaattaaaatagataaaacattacaaaacagcaattaaaggagcagcaaatgagattacgtcttaaaacactattatgctgaaaacctttaaaaaaaaaaactgttcaccttatcagtatagcaggcacatgggcaaggaggggagagcctttgttgtggctttgagaagtcacaaatggaaaacatgtggtgagacaaatgattttaaaccttgcctctcaatgtaattttgtatctcaaatgtaatattctggcccccagcccccacacccccaagccctaatctgttcccctacaggggtggcttgttttataccataccttaatgtgtctctttagccagagcaggctacagaggattcaaaagactctttctttcccagaggctgtaaatggagtccttagtcatactttatgtagctcaaatggcagttgatcatgcttaagtactagaaacaatcaaaggaccataacctcagagaacattcttccaacttagtaggaaaatctttgtcattcatccctagctcccaccccaccgggccccatgggctggcagttttcttacacaacatcatgtcctctcccatcttgttttatgcctaagcaagcctttgttcgtctctactaactgaactcaccagtcccatttcactttctagtgctaataacgcttacttgcaacatgtgagtttatttatttatttattgagatggagtttcactctgtcacccaggctggagtgcggtagcacaacaatcttggctcactgcaacctctgcctcccgggttcaagcaattctccctccctcagcctcccaagtagctgggattacaggcacccactaccacactgggctaatttttatatttttagtagagacgggtttccctgtgttgccatgctgccttgaactcctacctcagtgatctacccgcctcagcctccccaagtgctgggattacaggcatgagccaccgtgcccagcccatgtgagtttaaagttagaatttacataggtagcaagcaatttgcaaaagccaacaatgctataattgtccagtttttaaacatgtgagagcttggtgagcattctgaccttgggagctgaaaatatattgtctgttttattgacatgagggcgtatctccactgagatgctgctctgtaacagtacatgagtcctttcagaaactgttttgtaggaagcccatcttgtttgtataaaattgttactttatactcattttgctctacgttgatcttaaagggtggagctccactgtgcaggcaccttcctcagcaacctgtctccctctcctatttcagtaaggccaaaccacccagaatggttggattgatgagtgggtgggtggatggatgggtagttaagggatgggtggttgggctgatgggtgggtggaaggatgaatgggtaataagggtatgggtggtcaggtgggtagaaggatggatgggtaattaggggatgggtggttaagtgggtaggtggctggatggatggatgagtagagatggatggatgagtggatggatggatggatggatggatggatggatggatggatggatgaatgagtaaatgacacactgcctagaaggtattttaaaggacactttacatatggccaaattgatagtacagggcggagatggggaactctgagagaagggccctcaaggaggctggcatagaaaacagaaaccacagcccatccagagcacacattgatcacttcaatataactctgcattgaaagataacaaggtttttttcttctggaaaaaaaaaaaagtgcagatactggctgatgtgaaattagcaatcacagtcttaggttgtcctaaatgcttgaaggatgcatatgtttaactgccaagatgcctttgactaactcttgggttcttgataaaagtagagagaccaatgtctagtaagaaagtgactataattacctgctaaggtatctgatgcagtaggaatattagtttgtgttaaaagtgtttatctgaggttttctgtgaggatcccacgttattcataagtacacttcccaccctccctggcatagctccacaccctttttcacatggcctgaaattccctttaaagctccagagagtacctagaatatccgttaagcagatattctaccacaaagtggaggaaggagttgaggaaagagtcaagaggaattctagctcattccatttactcatgaatactcatgagattctcagttactgtttaccactttggcaaacaaaaagtagggccctgagaaaatgcaacttagaatgggtaagttttgatgaaagggaggaaggttggaaaggtgagaatgataaaagaaaaaaactgggttaacaagaatatgtcagcacagtaagatcctagagaagagtaagcctgtctgaaagggcacagcacagaaaatggacaaacttcctgatgtcaccaaataaagttgccctcaagtcagtaaatagaattctgaagaacagcatctttaaatctgtagttttagaccaagctctgtagaataacaatgccccaaagttatgccaggcttgctttaaagcctcttgtccatgaatatatttaaacggcttcagttttaccagcaaagctcctttggggtgtacactgttcaagtggctttctaccaccaagctgtttatcattttgtaatttcacatcaaagagagtatcactacattcagtaaagacctgcatcggtaagcaaaggcttgctgtggcccttggctaacacagacaggctcatatacagcttcatttacccggtgggataccctgtggaacatgaagagcatcgtgagccatgcgggctttgagagcaaagacctggaggcacctcactgtggatgacctgtatctcatctctgccttgtgaagtcatggagccttcatgtatatgacttgtccccctagttaggggccaaactccttgaaccacgttagtcttccccgtaaccccgactctcctcattctccagagcacccagtgaatagggtgtttccccttactctgccaatcataagcaaaagggaaccctcccagaactcaagcagcattagcacagtggagattaaagataccattcaaatgccttaaaggactttgttgatttcccacaggaaacattataaattgctgtgttttcagcacttgtaaaatccctaggtgggtctccctgcagaagagaggggcaaacaaaagtcacaaaaattctcagccaccgtcagcatatgctccttgtgttttctgcaccattcactctttcttaactgtccctttcctgctgtaagcacagtttgaatgtggtttaagtgagcatgaaaacaatgtagtatgcattggttaattctgctgctctggaaaaccaacaatgtcagaggcaggctgaattcagccccagggcagtctctgaactcctgaagcaataaaactgctgagggcttcattttaaggcccagaggttggtgcctgagctttagaagggccacctctgcctctgacatgactaacttctgctttatcctcatggccacacattccactgaaccacctccttcccacctgccagagcccttaagaggctactccagcctcctctcagagcccaggtccttgtgttctttgcatctctcttttcattcgttgggtgctctggagaatgaggggagttggggggatacagggaagaatgacatagtcctaggagtctggcccctaactaaagggataagtcatatgtgtgaaggctctgtgacctctcaagccaggtgtgacaggtaacccacagcgagatgcctccaggtctttgctcccaaagcccccatggctcaggatgctcttcttgtcccacttcttcttcttaccctgccttctacctggtgctcagtgtggtgacttcttctccacggtcctttcctcatccgtctgagaactgagcccttgctccctgtgccccactgtactctgaaagtacaatgagctgagccagaggcagcatgggctcaaggctaagaagaccggctcagaggcagtctaagcaacagaatgctaatcctgggtcctccccttcttagctgtgtgacttcaggcaagttatttcacctttctgcacatctgcttcatcatcttcaaaatgagggcaatagcacctactgcacatggtcactgaggaggattaacagagttaacccagggaaaaggcccagaatggtgcctagcaagcaataagtgcctagaattgtcatatattataggctgtcactcttagtaagctgtatgattctccagggtacagacactgctcatttatctttataaccccgtcacctgcagctgggcatgaagtagacaagcatacaagtttaatgctgaagaattaaagaaatgaataaatgaccaaatcaacaaatgaacagaccttagtaagaacacaggaagcagcatattattgcagcaaaagccctgggctcttggatccatgaagaccttgagtcctcttgggcactgacattcctggagttggtggggtgtggctctggaggcagcataggcagctgaggtcccctgggccagtcactggtaactcgggtccactccccactcaagaaccatgtggcttgagcaatccccaaacttggtttcctttgctgccaaagcaggcactggatggagcagagagccccataccctgtgggtctttccagactgagagcttagcaaagtagaatattctgactctgccctgcgacacactgattccactgtctgggatgggatagggcatctgtgtttttaaaaacctccccagatgatggtgaatctcaggcacaggtttgggaatgactggactagatttctcaggctggaatggggagaaggcttcccccacactcctcttccaacttccaccacacacatacacacacacaaacacacacacacacgccagggagatccttgatggaacctgtctccacactgttccttaaacacagaactctgggcactgccaactcccacataagcctatgctgctctttgaggggagtggagagttggggcccccattttgagactgagctccccactgcctcccctaccaaccgccctgacacacatgacaggcaatagaatcaactaccacctgtgattgatccatgctagctataaactgttatggacctggttaattgttttgcctgtataagcacattttgtttcatccatttttcaagctgaaggaaagttgttttataaaaggggatttaattaaatgttttgtcccagcctggcctttcctttctgcatctgcattatgcttgtgtcatattttccctagagggtaggaaaacaatttagtaaaaatgaaggattcattgatttactattgaaaaaggaaatgccaagctaacaactcccctctataattttctagtgaccatatgagagagcctagccatttaacttaaagacagtgtgtttcctggtgcacctggctctatctataccattcatgctgttaagtttatagtcttgctcttgattgaaatcatttcatgaacactcataagcgctatttttcttctctgaacgaaatagatgttcctgggtaactaaggtctttaattgtttctactgccagtttagtgactgggggtggggaattattctttccccaagaccctaacagtaggatcataacatgtctcccatcatttaactgtagctctccctctgcgtatagaatttaagttgacctactttcctgcctgttgagcggcctcgggcctctaacgttcttctagtagatatcagctgttttctgaactaaagtcttagatctttagtgcaatacactatcgtgcctcaaaggaagcaggacgcagtaatagtctgagggacctgggtatgacagggcccttgctgggcgccacttcctctagccatcctgtgtccactgacgaccgttgtgggatctgagcctgtctggccaaggaccagggcagttctggaagcaaccttcattctgaggggagagggcttgcaagcaaacagaggaaggaatgtgggactaggaatcaagaaaatacaatttgccataggagcactgtatctttgggccaatcgtgtcacttctggaagcttcagtgtctcttccagtgcagtctgtgattcattcattcaaaatgtatggagcccctgctatggggcacccactgtggctgggacaatagtggggaactcaagtagacctagtcctgctgacatgaagggccaagtctggtgggggaaataggttgaatcaactcttcacaaaaatgtgagatgttaatactccaataagagctttacatgaatggtgcacaatggtttgagatgtaacagggaaatctagctcaatgcctggttatacataatccagggagtgagggaaggccttgagaagaaagtgacttctgagtggacacatcaaagaaaagtaagagttaactcagagaaggaaggcttcaggaagaccccacctaggcagagtggcagtgctgacaaagacacagccaactcatcccagctgaggacactcatttccctgtgatgagcatttgccttctctcttgctggtccattaggaaacacaccagctgacctctagattggagctggccagccagaatgcatttatacctaattagtcacaaattacagtccgtaacaaggcaatgttttattttgctgtattgtaccaaaatccaggacagcctcactttcacagtttcttcttccatctgtaccaggaagaaggcaagactttgcctctgatctgattttcacaaatcatctgaccaaattggaagggactcattagaacagaacagtaactcacctatcagtttctgatggactgaacgagatctggctgaggctgttttgcaattatagcactttccagctgaaggcctcaaaatgttttgtgagcagtgatgagcaacagggcctcctagtgctaatactaagtgctctcataataaattttcaccgtcaacgtctggctcattagcctgttagggcaggagagggggcatgcctgtgagaaggaggtcatgcggtgaccctgccagcagtaggactggaccactgcccagtgctcgcaagacgaggtcgcatgtggaagtctcgtggaggttcaagcccacttctcccggtaccagtggacacccccagccctgatgtccggacaggtactgtgagggctgatttgatggaactcggagcaagagaagagcagaagggcagaaggaaaggcctgatctgaggatgaggaagggtggagaaacatgggttgggcccatgggactggttagatagaaaagctgggtaaaggattgttgtgtctgtaattttcctttctacatgatttctcctagttctgtcactggcccaggcagcccctgcagggagggtagcaatcctgttttgtgtgtaactctgttaaccctccaggtgtattactgagttggcagagcagagtggagaggaggacacttgtgtactgtttcaggctgtgtggcactaagctagggggctttggggagatgtctcagtggggcttcctatcaccccacaaatcctgccactgaactggctgcttctgaaacccaccccagcatacattcctctcattccaaggccccatatcacccaaaaaatttgatgtcattgattcctacctttaagataacatagtgaaagtctaacgtgtcaggcaatgtgttggattcaaggtgaagacatttttccttgctcccacttttctgcatttcccaattttctgtaatgagtcagtaattttttgaatagtaaagtttgccatagaactataactggaagtgaaaatatataagccacattttaatagttttgaagaactaaattacttttcttaagtatttaaagcttgtttactttgaaaactttgactttgttacctacttcactaagaaacacaacgccattggacccaagggctctcactatcgaccaatgcctttcctccaactcagagaatcaggtgaattgggtttatagtgcaaaagaaacttctttaaaattcaaaaacaaaccagtcatgagttctggctacaagatgcttacagtataaccaggtagaagagaaaaggcatacgaaaatacaattttttgtaatataaaatattagataatattttataaaatataagacaaaattgagaaggataaatactttaaaagaggtcttgataaggtcaagggatgccagcagaagccattttcccccagctgatggatggaaaagcttgatgacggcggggcgtgagagccctgcctgagagaaatcagggcctgggctgcagacaaggtagatttgggcaaccagggaataggttaaaatgagcagcggcagggaggtcagaaggggctcgtggggtggaccacatgagcttgattaggatgaagtaagggagacatgaagaaaaggaggtgaggttgagagagctgaatgtggagaggtaatggaggacgatggggactaggctgagggatttagttccccagtcaggggagctatacctgaatcaaactgatccagcagcagaggttagcatggaccagggtggaaagaggcatttatgagactgaatccaggtgagataagatgacctagggcagtagctgtgagatgggggggatgggccggaggtgtttcagaggcagcataggcgtattctggagaaataaggagtggaaaggattctcttttccagcctgtgccctcagactggctgaagctggcatgaaggggctacggtggttagaagttgcaatcgaacactggaaaggaaaattacaggttgctcttccaggaggacttcttcagcccagaggaactgcaggagttgccagcataatgaaatctaaacagggaattatcaaataagcaaaaaggataacccatgaggtttcttttttttccttctgcccctctttctcttttaagttattcatcactaaatatctatgaagcagttacattatataggaaaccaaaggaacacaatttaacacctagtttctgtcatcgaatgattttcaatatatttgcagacagaactgtattcacatgtctgcataccattgcacactttagttcacgagccaccttgagaaagatgctaggacttgagctgtaaacattgcctaaattaagggaaatttagtgtttggggggtattattatacagtgctactatgtgccatatactttacttttcatcttattgtgtccattttaaagataaggacactgagacccagagagatgaagttaagaggtaggtgacagagccaggaaagcttcatccaaaccacagcgccccctagagaggtagacagtgaaaggcaagtcttcctcataaaaacctggcatgcaaaggtatagaagatataggttatctatacttcaaaaccatcagaattcgaaaggtttcatatgcaccttccagcttactttccagttggttctaataaagttttctgagactcctttctgaaagattctgctgctgtcaggaatctgcatatttcctcaagatttggagctgggtaggacaagatagaaacacgaatagaacataagttaattgctttctggagtatgtttcagagtcagtgtatttcccatggtgttctgtatgcctgcctcctgggcttaaagggttaacagaacacccccaccttttataatatcaccagatctcgattaatctggcaaatgctataaatcaagggacagtgtgaaattgaacactaaatgtattggacgttattataaaaagagaaattggataatttctactcatttctatctgaaaatgaaaaactgccagggtaatgaatctccttgatctgctgaagtgcttatcagttacaaagtacttttccactgaagagataagcagagtcaaaacacacaaaaaaatcacaattttttgaatgaaaataaatcttcatgctgtttgtgggataaattccccccaaagaacccagcaaccatctcttttaaaaagcttcaaagtcgataggatttcttattgccctgaaacacgtcaggaaactaaagaaaactttgttacatgaactgtccacccttccatgaaatcaagagcaaacttatcaagattgatttctgtcatcaagtgcagttagatttgcataaaagggttggccaaaaagatatatctaaataacctttcattgttaaggctaacctccctttcactgttaagttcaaaggaaggaaagttctttgaaacaccaccagggctgattggtgctgctggtctaatcagagcatgttttgagtccaaaggtaagaaatgccttcagttggaataaaatgcaggcaagaggccaggcgcagtagcttatgcctgtaatcccagcactttggaaggccaaggtggggggatcatgaggtcaggagatcaagaccatcctagctaacatggtgaaaccctatctctactaaaaatacaaaaattagccgggtgtgggggtatatacctgtagtccgagctacttgggagtctgaggcaggagaatcgcttgaacctgggaggcggaggttgcagtgagccaagatcacgccactgcactccagcctggcaacagaatgagactccgtctcaaaaaaataatgtgggcaagatcagccaggtggccaccattctagggggaagagagcccttcaaatactgattccagggcagcctgcttgttttaacaaccttttctcggtaaagctctccaaaccctggaactgttccagttttccttttctgcatgaagtaggaatgtgattgtaatgagatagtttttcagaaatcagtgttgcagttctcatttttcctgtatttgataatacttgccctgtgcctattaatgagcctagtctagttgaggtaactggaatgggcaaagagtttactgcactgagaacctttccagggcctgttcccactacatacatcatcaggagctgagagagtttagaacatagtaattacccggtgtgtagtcatcttatacaaatcaatttattcacacacttaacaaatacatgtgtgccaagcactgttctgagcatttgaaataaacaaaaatgcctgtgctcagggtgttttcattttggcaagagaaaataagccgtgagaaattagcttaacaaatgggcaaattatatagtatatcaggtgataagtggtacagaaaaaaaaattgagcagaggaagagagaatggaggctgggttatagggatgggattgggctgtgatttgaattaggtagtccaagtaggcctcactgagaagttatctcttgagtaaagactgggaggaggaagagcattttagcagtggcaatagcttatgcaaagactgtaaggtgagatgtacctggcaaattggaggaacatcaagtgggccagtgaggctgaagggtgagcatgtaggagagtaggaggggctgagtttagagaagtaagaggggtgggaagatcatacagggccttataagccattgtaaggactcggcctttcactttaagaattgggtcacgaggtcgggagatcaagaccatcctggctaacacggtaaaaccccatatctattaaaaatacaaaaaattagccgggcatggtggcgggtgcctgtagtccagccactcaggaggctgaggcaggagaatggcctgaacctgggaggcggagcttgcagggagccaagattgcaccactgtactccagcctgggtgacagagcgagactccatcgcaaaaaaaaaaaaaaaggtgggggcagctactggaggatttcgcaacaagggatgtgatctaactggcaatttgaaagaactcctctgctgtcttgagaatacactgtattctacagggaggcaaaggtaggggctgagagttgaattaagagatgactgcaggaatctgggaaaatcaacaaataattcatggttctatgtgctatagtggcataaacgaagctggagctcaaagcactgtgtgcaactagttcttccagggaaggcttcccagggctgtgacttgtgaattgaaggaaagggacttagagaaggaaggcagatggcaggaggtgagatgagaaagatttaggggcaccagactgtgaaaggccttgagtaccaccaggactgatgccttttataaagccaagaaaatgcccaactatgtggcctaaacaaataggttcttatttttctcatgtattaggaaacctagaggaagcagtccaaaactagtggataaaatcagtgatgaggctctttttgtcatccttgttgtaatggcttgtgctggttctaaagagtgctgctgtgtatccatgttgtgggaaggaaaaaggaagagagcagcatgtcaggtgaatctagctctcccttttttaaattgggaaagcaaatctcctagaaaccctacccaacagacttcagcttgagtctgcctagcccaactgggtcacgtgaccatgcccacctggaaggtggctcagctgaaagggtggtggatatggtgtatgtcagctaaccaacagtgccaacacaaattcttaaatctatccaatgtgagtgaagatgatgcttcccccagagggccacatgcagcttcattggcctccccctctcagatctgggctcagcaaaagaacagctgctgaagcacccactctccactatggctatcactgccctgccccttccacagggccccaggtagactagctagggcctccaagtcccgcctttcctgcatgcctgtgaacatcactgattcaacagtagggaccaggccctatgccagcaatggaatctgcctctccataagagaaaggtgtgtgtgagtgtatgtaaccctcagaatttccttgggactctggcagtcacttctgttttgtcaaaagaggtttctatcctccccttccaagtgataaagcattaagacacacaggctgggggatggggtcagaacttgtggctgtgcattaatgagccccactgggagtcagcaaagcttgactttggtggtcacaacctgttttccttgatcccaggtgcctatctctcttcaccctctttccaaatctgttctccaaaaggttctgatgaagtcattaactttgaagtgtaaacaactgataagactgaaaatgccctctcccctagatgcattcttattctaatagctgtcaagccgctgtggcttgaacctaaacttggaatgggcagggcaccagagtggctggtttcagtttctagctctgccattcatgatccagtgaatcagtacatcttttgggcttcagtttcttcatctgtaaagtaacaaatttgaaagatatgacctctaaggccctccttgctctcctggtctatatggccaagtgagagaacacaacttgactgtgtactgacttctggtattactagcgcttagctgctgtcatgcgtggcattgatgcagaagcctcatcctacacacgctctgaggactaggactccacacacactcagcctccccctctggaggggtgatctccatctgggtgtgcactcccctcctctcagacctctgcaagcaggtatctgatgtgcagagtgatggagagaagctgcctcttggtatcatccactagactgtgggcttgctgagagcagagacatgtctggttcactaagtgtatgtaaaaatgaactgcctgaactgtggttagaaaggtagcagggatggacttctctttccactctgctccttacaaatagactccgccaggctctgccttttatctgttctaccttctcccctccttttctcttcctattgtcaggcaaaagctgctttcacacagtcctattatgacatctcaagttggactcttactccatacctcatccaaacatcctcacagcctaccatagctgcctgagttaccatttgattcagttcctaaagaaattcctctgctaaatgtcccatttatactaacaataaatatttgtaacacattttcaagtgctctcatctactctaagctctcctgggaggggtaatttcttttttaatttataattgatacataattatgcatatttatggggcacaatgtgatatttcaatgcatgtatacatagtatcgtgatcaaatcaggataattaccatatcactttaacatttatcattgtgatgacactgaaaatcttctagttatcatgaaatgtacacttcacctttacatgctgtagtcaccctactgtgtaatagagcaccaaaacttcctaactctaacatttgtacctattgaccagcctctcctcctgatccccatccccacccctctgcagcctctggtggacactattctactctctacctgtaggaaatcaactgtttggactccacatgagtgagatcacagtgtctggcttctttaccttaatgtaatgtcctccaggttcatctgtgttgccactaataacaggatttcattctgttttatggttaatattcgtgtgtgtgtctgtgtgtgtgtatgtgtctgtcttcattcatctgtagatgggcatttaggttgatttcatatcttgactattgtgaagtacactgaaaacatgggtgtgcagatgtctctgtgacattgatttcatttcatttggatacacacccactaatggggttgctggatcatatagtacttctgcttttaagtgttttgagagaccttcatactattttccataatggctgtactaatttacatttctaccaacaatgtataaagaattgcttttactctgcatccttgccagcattttttctggggtggggaggtctttttgataatagcattctaactggggtgaggtgatatctcatcgtggttttgatttgcatttctctgatgattaggcatgttcagtattttttcatatgtctgttgaatatttgtatattctgaaaaatgtctattcagaatgtctattcaggtcttttatccatttttaatcagatttttttttgctattgagtgttctgaattccccatatactgtggatattaaccccttgtcagatgtatagtttgcaaatacttcctcccagtctctaggttgtctcttcactttgtttccttcattgtgcagaagcttttgggcttgatgtaatcctatttgtctaattttagtttcgttgtctgtgctttcttatttttaaaaatccttgcccagctcaatttcatgaagcatttctcctatgttttcctttagtaatttcataatctgcatcctgcatttaagtctttagttcctttcgagttgatttgtatatatggtgagagacaggagtccagttttattcttctgcatgggggaggggtagtttcttgagcagataccaagttgtggtttctgaaagatgagctgacagccaagtaagagaccctgagggaagcaaccccaggagacatgactgagaaaaatatcagcattaagtgctagcagcctgatagggaacaaggataaaagatgaactatcagaacctgaggcacatttcaccaacatcacaccattgccttgtggccctttaaggatgaaatgccagctcagttgtagtatctatgtccagtcttaagttttctgaaaccaccattttctatatgccccacatcccatgatttttttaaaaattgcatataatgcttgtccttgttcaaaatcttttcttgtgagttgactcaagtcctactttgtaaaaggataggatacaagtaagaagtagattacttgctaattattggagatcacttgcttctctacatgagatgccctgatgcaacaggaagatgatttcagaatagttttttaaatatgtggaaagtagcttgaatatttatatctatatggttttaattatgtggcaaaaatatactggtatcatttcttagatttagagtctgagaccacataaggcaatatgggcaatttcagtgatctgttatgtgcatgaatgctttacacaagcaaaagtttagccatcatttccatggatatattctgggcattttaacctatgtcatgctttagcctggcacagagtaagcaagtgaaacattcctcagtaatcccatcagtgctgatagcatacaaagtagttgctttttaaacttttactttgttttcatgagttgtttttaaaaacaaacattgattgggccttgctttaacagtcacaataatgccttgtagataccagtaaactgtagcggctgttaagtgtgggctctggggtcagctgcccgtgtttgaatcccagctctgccacttacaagttctatagccatggcctagttactcagcctctgggcagctccatttcctctgttgtaaactgtggattataacaaattatctcagagggtccttgtgaggattaaatgagttaatatgtgaacagcaagtatagtactcaaaacagtgcctggtgcatagtaaatgttagctctcataattatgaacagttttctattaacctaaataattcccatttctagttcctttttccaacatggcactgggtgatcaaacaatgcctacttgaccctgagcaaaaatgtttttttctgcatgctgcatgcaggtatatttgaaaaacattaagaatatgagcctaaattgatattttttaaattatttagggatgaacaagaacaaaagggaggacaaaaaggctagaaaaattgctactacattttccagaaatggagaatcaataaactctgagctgggtattttaagaaaggaaacaataggtttccacaagatgtttcttagaaatccaaatgagcctagaaatttccagtggtttaattgtggggccaaaatagttctatactagtgactgaatataaaagggttgattaaaatgcttttttagtagttcgtatccttgaaagtaaagtctctgctacaacctgtgccaataagagccagtaaacagctaattacattataacatgggttttttaattgttaattataataaaagaagcaacaacccaacaataatttgccagtccgtacatctgtgaagtttaaatgggaaaattgcctcttgtctcagcaaggatgtaattgattcttgggcacttaacgatataatactagtttctgcctgttcttctttcttccttcaaagagctgacaccattatgtcactgatataaatggaatcttgaaggtacatcaaaaattctgtctttttaggaaaaaaaaaaaaagccattgtggctctttagtgtggagcaggtgcgtagtcaagaaggattgatccctgggtcaaggtcagagttcagctccagatggagtttttcacccttttctatggggtggatggagcatatcttgtcatgttagcaacagtcattgtgaaccttctaaaatgttttaaagtaacattttaggactgtcaaatgagagagtaaaaaggccttgtcagaggctatctgttctcatgtcaaccgaagctaactggaaaagaactctgggttcttgaaactgaatttgattagtggagatggaccagaaaagtgtgcatcaaaaaggacttgcaaaatattagcctcactacccattctcaaactcaaacagccccttatatttcattttttcagtttgacattaagtacccaaggagcagaaaaggaataaatgtaaagagtccacatcaaagtgctgtctatatttccattccagccagtacattgttttaattgccatttaaaaatgttcattgttaaccgacagccattcttggtagtggatatactttaattctttataataaaccatacatatatatttttaaagcttaacagacatcttgtcagtgtgatcactttttcttcatcctgatgcccaggttattccaaatacaatattttgtcctgatacgatgattatacttaaaaaaaaaaaaaaaaaaaaaaagctaagcctcattggtccccacatcaaaactaagtgtacaccaaatgattataaacatatctgttaattttaaacttcctccatttattaaatcgatatatataaccctctacctgaataattggattgaccacatgcaagtgtttttagctgaagtatacccttccaaacaagtcagaaggagcacaacagactgttctccctgcaaatgccctgaggggaaaatggatcacatagaatcatattttgcctccctctaataaaaacaacaaacagtattcagcactgattatagaactcatgctattaagtactgtgtggttgccaattcattaaattcacaaggaccctaggttggtgctattattatcatccctattttacagaccaggaaattgggacacagataacgtaggcctagtttcatatagctaataagtggcaaagctaaaattaaaacccagcacctgtgtttttaaccacctcactcctctccctgttggcagcatctgtattctttcttgcttttgttttgagatttttgattcttgggaagataactttttattgtgaaaaatatcaaactttaaaaggtttcaggccgggcacagtggctcaagcctgtaatcccaacactttgggaggccgaggcagatggatcacccagcacttggggaggcagaggcaggtggatcatgaggtcaggagattgagacccagcacttggggaggcggaggcaggtggatcatgaggtcaggagattgagaccatcctggctaacacagtgaaaccccgtctctactaaaaatacaaaaaattagccgggtgtggtggtgggcgcctgtagtcccagctactccccagctactcaggaggctgaggcaggagaatggcgtgaacccgggaggcggagcttgcaatgagctgagatcgtgctactgcactccagcctgggtgacagagtgagactctgtctcaaaaaaaaaaaaaaaggtttcaagtataatgtcctttttttcttgaatttttcacagtaagttgttcacttgatccttcatcactttcaaatacactaacatctaattatgacaaaccagaatcctacgtaaccacaatgcaaccaccagaatcattcaggtttcacatgttcactcagccctttaaatcaaaaggctgaaattcaaaatcatgtgttacatttactggtgtccctttagtcccctttaatctggaacagttcctaaatctttcattaactttcatgaccttgatatttttaaggattacaggtcagatactttgtagagatcccttattctgggtgtttctgatacttcctcatgattacattcagactgtacattgctgacaggaaaaacagaagcagtgctgcattcttcttgtcacatgccatcagttggcacgtgatttggacttgtcctgttactagtgacctgcattttgatcacttaattaagatggtgtcaaccaggtttctctgctgtaaagttactctttctaccccccataattaataagtattttgtagaaaggaactttgaagctatataaatatctcagtcctcatcaactttcaagtcattcatttattcatttgtatcagcatggactcatgcttttccattttattaaatggactttcatttgtaactaccattatttattttgatgttcaaattgtctttaatttgccactaggagcccctttaatccatctgctccgcccttaacatgttctcatcattttaaagcctttttattgttaattggtgcaatgagatgttttgggctcatcttgtaccttacttgctccagaccttggaatcaaccattttgttgaggatccctggttcctttacatgaagaattgtatttagaagccaagatatggtgctaggtgtgctcactgctgcttcatgaatgacccttttggtgaaaagaattaggaactctgtgtgtgtgtgtgtgtgtgtgtgtgtgtgtgtgtgtgtgtacacgcgcgtgtgtacacgtgtgtgtgtgtgtacgtgtgtgtgagggtaagtagagatttacatatatgttcatttctacatgtatatttgtgtgtgtgttctaataccttcaattccagttcaataccacagggttcattctagtctcttcctttccatatttttaactcccttctctggcagtgaaaaacctaatagcctgtgttcttaaccattctactatattgcgtgccactaggaggctcaaggaaaaagtcgatgacttcagggactgggtcatggatctcctctccaatatgtctatgaccttaaacaagtcttgaactactctggatttgccatttttcatctgtaaatagctgtgacaataatacctgtttcagaaggctgtatagggaagagcacagggccagggccacactggctctgatactcactggctgtgtgatcttgaacagtgacacaactgctctgagccttgtttcctttttttaaataatgtcaacttttattttagattcagggttacacatgcaggtctgttacatgagtataggtgaagtttggggtatgaatgatcccatcatccaagttatgagcataggacccaataggtagcttttaagccctttcttccctcctccctccctcctctagtagtttccagtgtctattgttcccatctttatgtctatgtgtacccagtgtttagctcccacttataagcaagaagatgtatttggttttctgttcctatgttaactcgctaaggatgatggcctccagctgcatccatgttgctgcaaaagatgtgatttcattctttttatggctgcataatattctatagtgtatatgtaccacattttctttatccaatccaccgttgatgggcacctgggttgattccatgtctttgctcttgtgaatagtgctgcgatgaacacaaaagtgaatgtgtctttttggtagaacaatttattttcctttggatacatacctagtaacaggattgctgggataaccatttggtagttctgtcttaagttctttgagaaatctccaaactgctgtccacagtgactgaactaatttacattcccatctacagtgtatgagttcccttttctctgcacccttgccagcatctgttttgtttttgtttttgtttgtctttttaatcatagccattctgactggcatgagataatatcatattgtggttttgatttgcgttttctgattagtgatgttcagcattttttcatatgtttattgtccacttgaatgtcttctcttgaaaagtttctgttcatgccttttgtccactttttcatgggattattcgttttttgcttgtttggttgtttaagttccctgtagattctggtattagacctttgttgactgcatagtttgcaaatattttctcctattctgtgggtggcctgtttattgtgttgatagtttcgtttgctgtgcaaaagctctttagtttaagttctgcttgtcaatttttgtttttgttgcacttgcttttaagggcttagtcataaattctttgccaaggccaatgtccagaatggtatttcctgggtttctttctagggtttttatagtttgaagttttacacttagttttttaattcaccttagattaatttttgtagtgaaaacgatgatctactttcattcttttgcatgtagctagtcagtcattccagcatcatttattaaatagagggtcctttccccattatttatttttgttgactttggttgtaggtgtgtggctttatttctgagttttctattctgttcagttggtctatgtgtctgtttttgtaccagtacaacgctgttttgcttactgtagccttatagtttcatgtgagacaatgtgatgtcttcaactttgttctttttgcctaggattgctttagctatttgggctctttttggttccatatgaattttagaatagtttttcctaattctatgaaaaatgacattggtagtctgataggaatagcattgaatctgtagattgctttggccattttaatattcttccaatccattagcatgaaatatttttccatttgtgccatctctgatttctttcagtagtgttttgtagttcttgtagagatctctcacctcacctccttggttagatgtattcctaggtattttaatctatgtctagccattgtaaatgggattgcattctagattcggctcttagcttagacattattggtgtatagaaatgtattgatttttgtacattgattttgtattctgaaactttaccaaaattgtttatcaggtctaggagccttttggcagagtcttgaggattttctttgctgatatgatagaatcatatactcagtaaagagagacaatttgactttttctttttgtattcagatgccttgtatttctttctcttgcctgatttgagctttgtttcttgatctttaaaatgtgaataatgctaccaccaagctcccagggcaactgtgatatttaaatgtatgtaaaaccacttggcacaatgcctcatagatagaaacaatcaaataatgatttccctcacctttcttctcaccagaatattacataataataatagtaataataaactgtaattgtataggttaacaacctaacacaagttaaaatgatcatgtcacttcttcagtacagcccagtgataatcttcaaaagatagcaattgtgtataagtcgcatattgaaggcattttcaccctttctgatattcccaagatgaggcagaactaggatggtagatgactgctctggcaagaaaggatctttttaagaaaattttgccatagagttttaactgtcatgcttaagtgtaataataaatattgatggcttcagttgattggatgcctattgtactaagaactttacaaactcattgttaatccttactacgtccctaaagaaagatattactttcttcatttcataaattagaacactgccatttagaaagcttaaatgtcttctccaaggccacacagccagtaaatgtctgggtacagattggacccaatgtgcaagagactccagaatctgccttctttctgttcagcccactgtcacattacccatcatggccagaaacacacctaggacatgaccctgtccagtttattcatggaactctggccatgtcccatttagacaaagagacaaaattgctaaaagtgaactcagaatatcacttttagttcccagcattccatactccctgtgttcgggaaatgcaagaacaaaatgaccacagtccttggcatcttgttgccacagtatttctccaacacaatcagatgagttggcatctgctcagacactaaaaggactcccacagaggctgaaataaattcagcatcatcaacctgttctttccctttttgtatcttgtttttcatagggccttgtgcctgtgggggtttatctgcatcctttgttgtaacttgcctgttcatttatctggatcccccgctagactgtgagttctggggatataaggagagtgttttggtcaacttcatctcacccacgctaacacagggtaggccttcataaatacatgctggctagctggctggatggatggtactggtaatttttatccttagtgacgtggggaagagggagataaacgtaaactgatagaaacggaaggagatagcaccgttagaggtagatggggcctattataaattttctaggaagttaatattttaaagaaacacaaatgttttaccttattttcaagagtgacttagagaaacttagaggtactgagcatgaattttagggcaaggctgcctgggttgaattctagctctgatactctctgtgtgacctcttgcaagttacttaagctctctgtgccccccctgcaaaatgggattgttgtgagaaataagtgagtttctctacgtgaggtgcttagagtggtgcctggcacatagtaagtgctttgtaagtatcagcgttcattaccatcttgtgcctttgttgctttggcagagattaagaccctaatagggtaatgaaaagaaaatatagtaaccaaagtcacataaactaagaaaatggggtcttggtccaaagcatcccacaaattaaattaccgtaaactggtaatttacacatgtagtatcaagggaaagggacaagaaaatgaaaatgaagctgcagcaaggtgagaactctagtatatttcccttcattattaacgtaatgcattatgaaaagttggcacaatcattgtgtataaaagcagacttcagtacacagtggcacacatccctgcaaatgaggacaatcaatcagaaagcaactccatgccttctccctgccagcacctgggctgctggatgttggaagaaattcacacaatcaagcctctgttttcactttaaattcatgatctcaagactgaaattggcactcaatattgctcagcaagcttactaggtttctctagaaggttcattttgcccttcccttagacatacaatttattccttctgcatcctttacaaaccaaccacagccacttctccatgctcctcatcagctgaggactttgttcacactgacttaagaatacagaaaccaacaggcctcctcaccttccacccctcgcctgccaccttcaaacctgccacccagcttcacttgttcccatctccttctcctgttacaatcaagaagtaatttcttttaaaggctcatgtttagacctcagatgtccttgcttctgcttcagaaactgcctcggatcacctgcgatgaacttgagggagaagggcagcaaaaaagagccaacactgtttaccacagatacattaactttcttattctttacaacaaggctaaaaagataatattactgtccccacattacaaataagaaaactaaggcacagcgagtttaatctgctttaaggttatgattccttatttcctcctcccacatctgctacctagtcttcatggtaaggctggatggagttaagaattcaatctctggaccagatgcccggattatcacttactagttttgtgactagtgagtgataatctgggcatctggtccagagatttgtatgccaacttttgacatagatttgtatgtcaactttttggtgctcaaaacagactctcttgctaggtctgctttctaaatgcagtacatggagggattgagtaaccacgtagaatgggatggcagcagaccacaagaagtgcatggaatgaggctctttgaactggaaagcaaaaactacagaatcctgatactccttagaggctctgtaggccttgaaggatgctcttccatagttccatggccatatggggggagttattgaagaatgccttagtcttctcggacttccagaacagaataccatagaccaggtgccttaaacaacagacacttattacttacggttctggagtcagagatgaccaatatcaaagtgctggcagagtctgttcctggtgtgggctctcctcctgacttgctgacagccaccttctcactgtcctcacacggtcttttcttggtgcttccatgtggagagacaggggctgatctctccctctctctctctccatccatccctttttccctccctccatccatccctttttccctccatccatccctttctccccctcctccctccctctccccccgctccattctccctttccctctcttcccctccctctctcttataaggacaccagtcctaccaaattaggaccctaccattatgaactaatttaaccttaactgtgtcctaaaagttctatcccaaaatacaggcatgttgggggttgggaattcaacatgtaaactttggggggaaggcaaatttcagtccatagtaggggcatttcaaagtctgccactacagtttctgtcctgagagcagtgaagcagtgtcacccaacttggaaagagcttcccaaactagtagaagactcgcccattctcctgttgaaggcagactcctcccctgagcaatagattctctcccnttctcactacctttccttagctatcccttccttctctcctatatcatcagtatctctctttagactgattggcaaacgtcagcataccagtatgttctcctataccccatccaccaaaatgactacctcttctttatcctttcccantcttctccagcagtgctgtaagactcagggggataactcaagcaagatggcatttagactcttttcagtctagctcctatgattgaatgatttgattttccactcatagtggatatctgatatgtatatacgtgcgaatgcatgtagacatatacacacatatgtacacatacacatatatacagatatacacatgtaatatgtgcacatatacaaatatacatacagatgtacaagcatacctcagagatattgtgggttcagttccaaaccactgtaataaagtgaatatcacaataaacccagtcacacaacatttttattttcccagtgcatatgaaagttaggtttacagaatgctgtgttttatttggtatgcaatagcagtatgtctaaaaatatatatatccagaccttaaaaaaaaaactttgttgctaaaaaatgctaatcatctaatacttcagtgagtagtagtaatctttttgctggtggagggtcttgcctcaatgttgatggctgctgactaatcgaggtggtggttgctgaaggctagggaggctgtggcaatatctataaataagacaatcatgaggtttgccacatcaattgactctccctttcacaaaacatttctctgtagcgtgcagtgctgcttgatagaattttatccatatagaacttctttccaatttggagccctctcaaaccctgccactgctttatcaatcaagtttgtataatatactaaacccttttttgttatttcaaccatgttcatggcatcttcaccaggagtagatccttctcagcaaaacattttttctcatccaaaaggagcaattcctaatctattcaagttttctcatgggattgcagcaatttggtcacatcttcaggctccatttctaattctagttctcttgttatttctaccacatctgtgttacttcctccactgaaaccttgagccccactcccccaaccccctccaggagtcatccatgagggttggagtcaactccttccaaatgcctattaatgttgatgttttgacctccttccatgaatcatgaatgttcttaatggcattcagaatgctgcattctttctagaaggtcttcaatttgctttgcccagatagagatagaggaatcttcaatttgctttgcccagatagtgacagaggaatcactatctatggcagctatagccttatgaaatatatttcttatataataagacttgaaagttgaaattattccttaattcactggctgatgttgtattagccacaaaaacatcaatctccttttacatccctatcagagctcttaggtgactaggtgcattgtcaatgagtagcaatgttttgaaaggaatctttttctgagcagtagatctcaatagtgggcttaaaatgttcagtaaatcatgctgtaaacagatgtggcatcatcaggctttgttgttccatttatataacataggcagagtcaatttagcataactcttaatggccctaggattttcagaatggcaaatgaccatcagcatcaacttaaagacactggctgcattagcccctcacaagagaatcagcctgtcctttaaagctttgaagccaggctttggcttctcttctctagctatgaaagtcctatatggcatctttttccaacgtaagaccgttttgtctacattgacaatctgttatttagtgtagccaccttcatcaatgattttaactagatcttctggataacttgctgctttccctttaacttttatgctatggagatagctcctttccttaaaccttatgagctagcttctgctagcttcaaacttttcttctgcagtttcctcacccctctcaatcttcacagaattgaagagagttagggcccccctctgggttaggccttggctcaagggaatagtgtggctgttttcatcttctatccagatggctaaaacttcctgcctttcagtaataagcctgtttcactttcttgccatcggtgtgttcccaggagtagcatctttaacttccttcaagaactcttcctttgcattcacaatttggctgtttggtgtaagaggcctagctctcagcctaccttggctttcaatatgccttcctcgctaagcttaatcatttctagcttttgatttaaagtgagagacatgtgactcttcctttcacttaaacacttagaggccatggtagtgatgttaattggcttaatttcaatactgctgtctcagggaataggctggcctgaggagagagagagagagggaaacagctagcaagtggaccagtcagaacacacacacatttatccattaagtttgctatcttttatgggcaatgtctgtggtgtcccagaacaattacaaaacagtaacatcaaagatcactggatacaaatcaccataacagatatgataatgatgaaatgtttgaaatatctctaaaacaccaaagtgtaatacagagacctgaaaagagcacattctactggaaatattgtgccagtagatttgctcaacatacagttgccacaaacttgcagtttgttaaaaatgcaatatctgcaaagtgcaagaaaacaaaacttaataaagcaagatttgcttgtacacacatacatacagaaccacaaacacaatgaaaatatacagatacacatagatatgcagacatatacacatattgacagatacatagacatacacacataagatacatacacacagacttctatacaggtgcacacatgtacaaatatacacacaaatgcaggtatacctacacacatacacaagtgacaggaattgtgaaaagggaaagaggaattgaaatgcaattgataaatcatgtgaaagctgacaagaaaaaatcagactgaattcctgcctttccaccaaacactgactatttcattttcagcacatttttcaagtgcctgctatgtgtctagccctgggccaggcactggcccttgcctttaaatggtctatttgaggtgacagtgtgtttaatgggatttttaaagggggcacaggcccctcaccagaaaaagccagtatattttcacccacgtaagactgcttagagcatgctaacatacctttaccataacacacatgcatgtacatgcatgcgcacgcacgtacacacacacacacacacacacacacagttaataatactgatctctgtactttggtgcctgcaatatggcttccagagcaacatctgatattgtacagttagtttactacttcaatggggctcacaatggagagccatgagttgagactaggtcaaggacagagctgacagccttttctttgctcattcccgagtcacatagaggtctggtgacaggtgaagagttctctagagttatttaaagttgtggttcctctttccgccagctgcctccccttctcccacaggaccactcttgtacagtggctcccactgccccaccaccatttccagcatatctctctgaggtgggagtctgtaatcgggaatgagtgggtgagtcttgttttagtataatgagccacctttgaaacggcaacccccaactcttgaacatcccccaggactgtacctctcagcataatgcatcttttcaaacttcctgaagtgtcagaggcatttccccctcacagttcatcttccttggtccttattgtgacaagtctttggaaaagcacacacctctgggctgggtctttcctaagtcagccatcttctgctttactgccttcacactcccaggcaattgagaaggaggcactccatgaaattcagcagctatagagaaccacggtccctgttattccacaccccgttgctctctgttcaataacatcaccatgaggtgggagaaaataattagaagttcctcctgtaggattcagaggcgttttctgtaagggaaagcccacaaatccctggatgttcaggaccagttcctctgtttaaaactttagccagagcttcctggccctttctcccacctagagtaagaaaaaatcagaattggtccactaatatccagtgtaactgcttgccattgtcaattcctgctacaaagcctgggcacatttcatgtaagacactgtgggaagagagaagaaagatccagacctggaacctgccttcacgttatttagagtttggggtggaagagggagacggttgcacagaaaatctaagaaaaggcagattatgtgctgccactaaggaacaaacaagaactctgatggcgctaaagagggaggaataaattccaactgatgcttcctgtaaaaagtggcacctggattagagagtgaaaagaattccaaaagtcagagacagggaaagtgatgggacttccagatgtgggggactgtgtacagagagagtctgagggatttgcagtgtggatctggggaatgtgaggagcttggcatgatggcaaacaccggagaaggagcctggtctgataactccagccgggggagggcatagctcaaaagcattagtggtcagatgctgtgctgtagaaggtgcagggccactgagggtgttggggtcatcacgcctgcactttaggagacaacatggattctgagaagatggctgccagagacaaaccacagcccttgccccctgtctttttcacttccttctcgggggccaacaaaagtgaggttagagagtccagaggacctgtcagggagagcaagttcaggacttctggttccattgcatcttgcaacacctggcagccagcagcagaggaggagtctcacccttcttcaaagagaaggccttagattttgtagttccctgaaggagctcatctgtctgtccccttagtaggggactatgtctctcctgactacagggtgtggaatttgatgaggttaccaagtcatactgactactggccctcccggactgaaatgggacttccccgataggcagtattggtcccagtttggaaggattcaatcagtgccttagcagaagggcaacagtttgtctgcttgttgttcactggcccacaagaatagttaccggcatacctcctgcctctgtacccctgccctgtctgatagaataccccaacaggcagacctgtacaggtattgagggagcacacaaaaatgaataggcaatgaaaaaaacaattaaaaattgcaaccagcttaagaggactcttgtaaccaggggaagagagacctggctgagcaaccagggatggcagcgttatttatagtagaactaatggaaagagagaagacattaataaaagtaattagaacaaagatataattagagtacaggaagggctttctagaactaagaatgatatttctgaattttttaaattcagtcgacaaattgtaaaaatgaatgctcactgctgagaatagagttcgtgttctggaagatcgagttaaatacctcaagacacagaactagccctcaaaagtagaaatcgtggaaaaataaaagagacttggagaacaaattcagaggatctaccatattaaccatgggaatgcagaagatatgaagtagcaggtggaaggaaagtggtaagccaaaagcagaaggaaaaattgaatgtaggacccaagctaaagaaatatttggtcctttagattaaaaggcccactgagccttagaggatgaattaagaggaaaaacaaacaaaccttagacatactttggtgaaattcccacatctcaaagaggggaaaaaaaatcttacagaccttctgatagaacaggttacttactgattatctaaaacactagaatgtagagaacaccgaaatgacacctgtagacataaagaaattcttaataaatttataaggattgttaaaaacataattctaaaattctacatccagccaaagtattattcagctggaaggacaaaagagttatattagaggccctattctctaattataatccagttgtattgtaagtcatcaacaacaaatgattaccaaaaaaggtttaattacttgcaaattaagaaacattattttaaattatctcttgaataataggaaaatcctcgctaaaatttaatgttatctagtcagtaagaaaaaagaaaacattcataccaaagtgtataggacacagctaaattgtactcaaagggaaatatgcagtcttaaatacttttagtatattagataaattaaaatgaaagtaaaaaaagactgaaaataaataaaatttatgtataccacttaaggaattagaagaagaatagtaaagtgcaaaagaagacaattctggcagcaatgccctaagataaagggtagaaataattctgcagcaatataataaagtcctgagatacagaagcagcaggatcaaaatgaagagctggattcagaagctgttttggaagtgaaatgatcctgacatctagaagtagaaaataggaagtaagagaagtcgaagatgagtaagaatttgggcttgggtaatgaggtggaaggtgatattattaatatatgagagaatggagaagaaagactaagtttgagaggtcagacaagttgaattttgaatacagggagttggagatgcctgaagcaggcagggggctgtaagaggtgccatactcactataaatctattatagccctgcttaccccagatttttgtgtccccagtacagggctgcagttagcatctcaaggcaacaaataagcaaaaaaccgtttaatttaggctgatcatggagaagtccagtgtgggccctgatgtgagagagaaggctctatcctctccaaccctctcctctactacaattcagaggggctatcctaggagattgggacagggagttaaggggtagaaagagacaaagtccgcatttcttcaaatgggctttattattcaactcaaatgccctacttaggaaacaagtgaacttctcaagagacgtgtccctgaagtagttaaacacaatctcagttgctgttcaatgactgttaaattcaactgtagcacttcagctcaatctaagttttcattgtccttcttctcctgctgttcctgcagcccagaaccccagcaacacatcaccaagaaatttcgatcttgggaatcaaaagaattgctggtcaagatctcttaatattaagataactcttttaaacaaatctgctaacaaacgttcttgcttctatccaagttaatcttcctgcatagcttctaggaaaagcagcagctcaataataatattcacttggaaaacagaaccaggcagagaaaatgctggaaagaatcgcttctatcctgtgcttctacttagaccatcttgactttctctttgatgcagaaggatagcttcaggcaaagtatatttgcttaatcctctaccactgatttgtgccttgttaacttagcccttggtaaggtttaagcggaatgaaatggaaacattgaatactggcagcagattttaagcttttctggtgtactgtttgaggctatggaaacaaaggactgagcagctaagccatcattcattctagactctcagaggtgcttataatatggagacctcaagttactccttcttgctgtgtcacctgtgcctgaaaatgtctgtgcattatcccaaaaacgattgtctcatgttcaagccatggaagatcagataactatttttgtgcttgccatatttcaatcagaataaatagaaggatattacactatttacagttgaagcctccagagctttattttgagttaataccagtggtggtaactgaatatgggcactatggcctgacctcacatccaaacaagcccaattcatgctccaggaaaagaaaggcgcagatatccaaagtagttctgagaaccactgacataatcactagagaaaactggtatttctgatcccagaattaactagcctctcttgcaagaaattgtcaaaatgcggtcccggcaggggttcttttgtcttttccttttccttttatttttatgcagatcttttgtaaagtcagttcccatgtttcctggctagtgatgctcattagcagtccaaataaaatgatggcaaaatggcccaattcttgattttttttaagctgcacatacctctttagagtgaataaaagtaccaatttggaaatttaggtgaggttttattttccttctatgtactaacattacttgcttgttatgatactcatgtttttgtctctttgcattagctgaaaacatacttttaataatgttccaaagaaggggattttggaaatagactttcagatttggaggggtggaacatttaatctggagaatttcgcatagcttagaaaaggttcaggtatctgaaagacaccctgctcgaggcggtttcacctgaggttatttcttgaataattggctgccattgtgggattctcttcatgtcttcatgctttctttggtgacatcttacatataaatattatacagtgctaatagcagcagcattatttctgaacaggccttatgaacattgctagctgtgagttgtcctgctcatcatcattgaataccctcactctgtcctgtagcagaacctagggcctttggcttcagagccccaatatgcaatatgtggtccaaagaccaccagcatccaaatcacctaagagtttgttagaaatgcagaaagaatctcagaccccaacagtacctactgctatggactgaatcacatcccccagccagattctaatgcccaatgtaactataaagatagggcttataaacaggtaattagattaaatgaaagcataaacattgggccccgatctgatagaattagtgtccttataagagagtgctgtctctctcagcatgtgtgttcaaagaaaaaaagtcaggtgagcacacaatgagaaggccaccatctgcaacccacaagaaaagccctccgcaggaacttaattggccagcatcttgatcctgggcttcccaatcctcagaactgtgagaaacaaatttctgtttgaaccatccatttccagtttatggtaatttgttacggtagctcaagctgctaatatacctactgattcaaagtctttatcctaacaagatcctcaggtaatgagtatgcatattaaaatttcagaagcacattgctttagttaattttgatcatgacattatttaaactccttccctatcctgaccatcacttttccatgggaggaacttgagtcatgaactggaatggactttgaaatgaactctaggatttttaggccctgactctgattctaaagatccttgtcagcctcaacttgcaattctctgaaattaagagaacccataggccctggttaaagatgaacaactgcacaaaacatcataaaaataaaaggataatggatatgttcttttaaaaacgtgggatattacaaaatgttacataaagtttttattcaataactggataagaatggcatatttcctcttttttttcttagaattgtattacagatgcatagattcttgagttcaaagaaaaaaatcacctaggatattgtcagctgcagtatcatagcctaagattttgccactcaatttgactatcatccttacagtatagagtcctgctgtatctttgcatttgtcttctcatattgtctaataattttgaaatggatttttgtaaatgttgttatttttgccatataggtaagaaatgagaaatgagatctgaattctcaattgtgttctgtgaaagctaaaagtagactacaaagagaatatttcctgttttatccttttgacagttgatgtgatactttaggcgacataataaaactgaaggataataaagatgattcatttcactattatatctaggtagtaccattaatctttttattttcatattaatttggtattttttcttttctttttcttttttttttttttttttctcgagatggagtttcactctgttgcccaggctggagtgcagtggcacaaccttggctcgctgcaacctctgcctcccaggttcaagcaattctcctgcctcagccacccaagtagctggggttacaggcatgcgccaccatgcctggctaacttttgtgtttttagtagagacagggttttgccatgttggccaggctggtctcgaactcctgaccttaggtgatctcccggccttggccttccaaagtgctgggatcacaggcgtgagccaccatgcccggcctaatttggtcttttttagcatcattgggaataatgagtaatgatgaaataattcctagaatgaagaaatagcatactttttaagatacaggaaaaacctgaggtcaggagttcaagaccagcttgaccaacatggtgaaaccctgtctttactaaaaatacaaaggcaagcacctgtgatcccagctactcgggaggctgggacaggagaatcacttgaacccaggaggcggaggttgcagtgagtcgagatcgcgccattgcactccaccttgggcgacaagagtgagattccatctcaaaaaaaaaaagatacaggaaaaataaaatcttagtgatcctataatgtatcttagatttcaaaaacagtccactggatctatgtgaattacaaaacaaaatgagtattattctccgttttaaataagtaagctttctctatgtgttttgaaagatttatgggaaataatttaaaaagtcataaaatatcaatacttacttacaagtagaactactcaaaagagaaaccccaaaactaaaataggcccaatgaatcctatagtaccctgagtgttaagaggtattaacacattagctagcatatcaacaagatttcatagacattattgcttttaaaataaaactaagcttgtaaaacatcaattaagcaagacttccagaatgcctctgtgcagagcttggcagacattctcttcaacaaaaaaggcatttaaaccagtgaaaattataaaataaaacgtttaaagtctctagaaattgatctaaaggtatgtagagaatccagaagcatttgttcaagaaaatctattcaattttagttagaatgtcaagtttgtgacatttgtgccagaatatgctgttctccctccactgctgtttcaatgttatgaaaacactactcccaatgaatacaaccaagaatacaggagctcctcctgttccccgtcagagagctctggtttcaccctgggagaggcagaccactagtgtttcccatcccaccctcagctctgtgttgcaaatgctctgagtgtatgcagttttaaaaaataatgctccctttccccacctatatgatagaggttctatcccacatgcagcaggctgagaatattggggacccaatcaccaccttttcagcttctactcatagacagaggtgccatttcaggagggaaaaactgagaagactgtggggctatcacctcctctcccagcttctgctcagagggtagagtatccacaaaagtaggcccagccaagaagatgggacccaccatcctctccccgactgcttgcttgtagggtagatattatcaatccaagagaggtaaaatgggaggtctacggctccacagccctgccaagagagttgacttggaatggagcagggaggaacttatgccttcaggtttttttgaaatgaatagacatctcagtggcaagcaatgaagtggagactaatagcacttgaaacaactagcaacaaacaaaaaggcagaccagccaaagttcaacagataaaacagggaaaaagacagacaaaaaaggcccttctgggatcacattcatgcctgggggtccaaaggtgctgggttacacccccttggatgcccctgagagctactagtgcctggatgaaagtggggctgttttgacagcattccccaagccacacaaagatccatcagcaagaggaaaagactttctgacttaagaggcttaagcataacttatgaccaaaataacacgaactgaacattaagctacgctgatccagggacatcttttaggaagacttaaaaacaaaggagaaagaaaactgagcagtaaccatcagaggctgcacaaggcaaggaaaatagacttccaacaatttgtctaggcaagccattaaataaattaacaaaaccaggaattatcaacatgccatgggtatgggggaggaggctaatgagaatccaaaattgctacagtgtattacctaaaatgtccagtttttgaccaaaaaaatacatatacatggaaagaggtagattagtgcagcccttgtacaggaataaagagggggaaaaaagagtatgtgtggggcgggctaggggaatgcaaactgcttttgagggggcacagatgcggaacttagaaaacaaagacttcaaagcagctattagaaatatgtttaaagaactaacaaaagccatgtttaaagaagtaaaagaatgataatgctaatttatcaaatgggaggctgaggcaggcagatcacctgaggtcaggagtttgagaccagcctagccaacatggtgagaacctgtctctactaaaaatacaaaaaaattaggtgtggtggcaggcacctgtaatcccagctactcgggaggctgaggcaggagaatcactcaaacccaggaggcagaagttgcagtgagctcagatcacgccactgcgctctagcctgggtgacagagtgagactctgtctccaaaaaaaaaaaagaaaaaagaaaaattatacaaaaaattaaaaattcttgaggtgaaagtataataacaaatgaaaaatttcctaaaagggcccaactatatatttgagctagaaaaagaaatagtcagtgaacttgatgatacatcattagaaagtatataatcagaagaacaaaataagaagaaaaaatgagcggataattagagacctctgagataccatttggaacaccaacatgtgtgtaatggaagttttggaaggagaagagaaagggcagaaaaaaataatccaaggaataatggctgaaaacctcccaaatatgatttttaaaaatcaatccacaccttcaagaagttcagtgaattacaagtagggaaaacgaaagccatatcaagacacattatactcaaagtgttgaaagacaaagtgaaaatcttgggtgcaataagagaagttattcatcacacacaagagaactccaataataggaatatctgacttcttatcagaattaatgaagtccacaaagcagtgagataacataaaatgcttaaaaaactatcagcaagaagccaatacccagcaaaactatctttcagaaaggaaaacaaagtcacatttccaaataaagactgaatttgttgttagcatacctgcctgacaataattactaaggaagttttttttaatgaaaggaaatgacacaagactgcaattcaaatccacgtggaaaaaaaaaagtgccggcaaaggtaactacgtattaactataaaaaacagcataattacatattgtatctcctttctttttaaaactaaaaacaatataaaattcaattgtgtctataggatataaagatatgtatttgacaataatagcacaaatgaggagtgaggaaaggaagctatagtggaataaggaagtggcatgagacagtaactcaaatccacaggaagaaataaagagtaacagaagttgtaaataagattaatagaaaaactttgtaaatatacttttttcactcttaattttttaaaaagatgcaagattgatataaagtagcaacaccgaattgtgtttataacatatatagatgtaatatatatgacagcacaaaggatgttgttaaatcttatttctggttcagtaagtaagagtggagcaaatgttctacatcttactggaattgagttattataaatccaaagcagagtctaagaagttgagatgtatattgtaacacctagagcaaccactaagaaaataacaaaaaatatgattttttaaaatcaacaaataaacataggatacaaatagcaaaatggaagaagtaaatccaactatatcaataacattaaatgtgaatgaactaaacaatgtaatcaaaaggcagacactgtcagactgaatttgaaaaaaaaaaaaactaatttcacctagattcaaagatacaaatatcctgaagggaaaggggatgggaaaagatacaccatgcaaacaataaccacaagagatctggagtagtatactaatatcagacaaatagacttatgacatatggagagatgaaaaggaacactttataataatgaaagggttaattcatttggaatatataaccattataaacatagatgcactcaacaacaaggtcccaggatacatgaagcaaaaactgacagaaaagttaaaaacattaaagaaagtatctttcagttctacaaaaaaaaaaaaaaaaaaacacaaaggtgctaagtaaattgctagagtttgagaaatgccacattctaccacactgcaataatatttgcagatttcaagttcactttacattgttatatatggacatctcgagcaataagtatattccaataatttctacacttaaatcttctcataaaagtctattcatgccaaaggatttttaaatttttataatttcttcctttttattcgttgaggtaggcagcatgccaaattaaatttttttaaaaaaactgtttaattcttctgtttcttattaccagtgtaacttctctcaaattagctaatctttgtgggtctcagtgttcttatctttaaaatgacatggtagggtgcgatcatctgagcttccttccacttacagttctgagactggtgttttcaccatgaaaatgaactgtttcaccaaggtaatcatcaggaaggccagtagaatctagatttctccatctgagatggtgagatgtacctcactagggtagaatttcagcttctagaaagacttctgagaactcttaacatctgtatggaattcataggtttaagttggagcatttaataaagcatattttgatttaaggcatcataagtggattctgttcaggagcactttcattcctcctgtgtaggtcctactatatcttatgatatgatctgcactcctgacatctgccattgtcagatgccacaacctgtatgtgaatttcttgtgaaaacctgatccagcctaggaataggaacagtctatgtcgagttgtacatgaatattcaggtaccttagagaaacatttaaagacacaattctaacattaaggctggaaacaaagctatgtttaagatttattatatttatggatttcttaagaaatttcaagtccctgaaaacttagtttccagtttaagtgaaacctttttactgctgcatgcttactaatgtgaatagctttctacactagtctgatgccaggtaggaaaaacaatggcacattcaagctgagtaaattaaaggaacttagcaaggaactattataagagctggttttagaaaacaaggaatagtgcagtaccccaggactggaatcaatggagagcagttaccaccctatacccaaatgggaatattaaccagaacccagagagggtagctgggtggggtagatagagagggattaaggagctgaggctttgatagaagaacacagacaagcctggtgacctggcaggaaggaagaaatagataccctgtctcactctcctctctccttccagtatcctgccagtacttcctattggctaaacctattcaagaccaaagagcacgataacccaattgatgccatctgcattggtctgcattccagagcccaggataatgtagagaaaagggggtagagtagatgtagagggaaaaatgaaaaagtcagcagtccagaagatccaagggtaaaatattaaaaacaattgcaaagttgttacttcacccacgatcaggactgggggaggcaaacaaggtacctaggatgcaaaatctaaggaagcactcactctcgggctcatacaaatgctcagcacttgcacgatcctgagagacaggatgtctcccttgcctaactctagtcttggctctgattccacccagtgactaaaagttgcttgacacagaattttaaaagggaatgaattaccttttttttttttttttttgcataaattcagtcaaaagtttttttaattgtttatttccataggtttttgggaaacaggtggtatttgcttacatgagtaagttcttttgtggtgatttgtgagattttggtgcacctatcacccgagtagtatacactggacccaatttggagtctttatccctcacccacctgccagcctttgccctgactccccaatgttcaatgtatcattcatatgcttttttgtcctcatagcttagttcccacttatgagtgagaacatacgacgtttggttttccattcctgagttacttctcttaaaataatagtttccagttccatccaggttcctgcggatgccattaattcctttcttttttacggctgagtagtagagcatgaattatcttttaatttgtaagcataaaaagaatattttgtttgaaagatttcaaaatactcttttgaatttttccccaatgacagcaaataacatactagccatacatgaaatatccagaggccagtatgtataatggcttgacattattattgaaccctggatttttattattttgtgtgggtatccatttattccagctgcacgttttttcacactttagcatttttgaagtcaagatgtgtctcataatcagtggtgtcacaaatataattaacagcgtttttcttcttagatgtacataaagtaatagtatgccttatcatgaactacatctaggtttgatgaaactcaccgtatgtactttaaagatatatatgagtgtaacaaatttttcatgtctaccacaatatctagcatatactaatggtcttgatatattctcaactggtatttcatgaatgaatgagtgggtgagttagtgagtgaaggagagaatgaatgaaatagtctacctgccctgcttttaggatgtcgatagtgtggtgtcaggaaaaatatcagttcatatacaacagttgtttaagctgtcatcatgatctcctagaatgataggccaaaacagcctgagtgttacattagccacaagcatccaattaactttcattatgttattttccgccaaattgatgctaattctgtttccatgctgtgcactttccgtagtcttcatgataatttcagaacctgttttacaacatattcttgctactcttttcctctttgcctttctcttctgctctaagacaacttcttcccaatagtattgttgccaattttctttcactttcctgattttaaaccactgattccaaaatcaaggtgcagttttcaatataattctagtgttaaccatgaattcttccccttttaaaattttaaatatttaatttctttttaacatagtcatgcacgcaagcatgcacttcagcccaatggtgaataacagatttgaccagagaaaaacattatttttctagtgatttactttaatccgtctcagcaagaaactaaaattattttcttctctttttatgtgtcatgcagtagcagcttcctagcttacccattgtctttctgtcaactttccttttaaaattaagatatttactcatttttagcaaaaaacaagataatgcattattaagacgtatttttgacttgattctcttctgagactagggaagaagttttttcacttaaaaagtaaaaatagaagtgaaatatagatatatatgtgcatgtacatatatatgtatgtgtgtgtatgtgtgtgtgtgtatacaacaaatctgtgaatttattattaatagcatctggtcttaatatggtctataatataatatggtcttacagagtgttaactgctccaaatgaaaataaggtttcagttatttgtagagattgtagatcaaatctgcttccaattgtgggcttaaacaatagttttggcaactgttatatatcccaaagctgttttaattttaattttagtgatatattagtgttggtgaaacaatcttctttggctatttttccatgttttcagtgcacatggttaataattctgtactgtctgctggatgttggtgatagatagcctgaagcaacagatttactggtgcaaaattattaaagtaaccaattgcaagtgctttttaatggttaatataaagaaaagggttataaatctctttttgcttttaattactaaaatacatggtgttacaataacttcagatcctcttcccaaactccatatgttttatataatacatgaatattacctagtgtagattctacatattggctgttactatgataattttgtgtctccaactcccttttcacccgctgcctgccttccacgcttcatggtggagatacctttgttggccttaggcttttgttcccatctctttctgctctcaggaataagtctgattcacttgtatcttgtgtgaatacaagctcaaatattacctctcccaagtccttgccttgtaaggcctaatcctcaacaaggaatgaagagctttatcctgtgctaaggaagtctaggcattggcagttagggaaattcatgtcttgggaggaagccttctcaaaacatcttagaaaccatctttccctatgaatagtcaaagccaatgtggtggtaaggtggtggcgggggggtagttcagaatcaaccattagaatttcatgttttgaatgaattgtgttgtaggtacctatcatcaattttgcaaactttgttgttgcttctaaggatctttcaagatatcactcacaaaaatatttgctttgcttgggttaatgttcctccgggntattgcctagaggggttttacagttctttaaatatattaaatatatgttctatgcattcccccctttattgtcaaagtatacttgtgattttgtaaatgatgttcatggggagaatatgctccttgcatcaagagaatgcattcccattaaggctccttcccttccaggtttcccactgaagcctgagcacatcaaagagcagcaatgtggagactcaccctgagatctcactgctgacccatggtgcacaccaagcatggtctttaatggcaagctgggattaggccacaattctgcctagagttcctcgtagcttgggacactgaaaagtgagggaaggagatgcacttctggcatcatatcattctgtttatttaactgtgaaataaccacaatggttttcaggttttaggttttccacttctcgctcagacccctgagagtctgggatttgtttttcaaccatttatggtttcataccaacatataaagctcctacaactacttcatattccgtgataaaatgtccctcttttttcccatgtaacttgttcagtctgacattgagaagactccccacccagtaacactagaattttaaaaagcgaatccacttgaaaggatagcttttctggggatgtgcatttgactctgataaatccctaattgcccaggcagggcacccagagtgaagccttagggaagaaaggccagatgccttgataagctattacatctgtcttcctaccaaaggatgtcagtatgcttgcagcttaggtcaaaagaaatcagtctgtgtattcattttcaatctagtttctaatggactcttatccgtagcctgaaattagcttacatcttggcagagctaagtacttcaaactcaagggaagttgtgccaaacataaagtacaggatgtagatctgcatttgtgtctggaacaggtacttgcttattcttgtttatttttcaaagaacataatgttttcagcatacttatacactccaaaatgtatatctaaattgtcagatacatgtaaacaccagccacacattttatctctgcagccagaacatccccactcttaagtccaaaacctccatcataaacaagcctccactggaatcagaaatcacaagaaaaatcacaggtgaggtaaggtaaaacataactcttttgctggaaatcttcacagttaaatcttttattcaggaggcctgagtagcaaagacaacaatatctattaataccactaccacaacaagaacaacagctacttcttctaagcattttctaggggctagatcctgtgccaagccccttacatgaattttttttattattatactttaaggtctagggtacatgtacacaacgtgcaggtttgttacatatgtatacatgtgccacgttggtgtgctgcacccattaactcatcatttacattaggtatatctcctaatgctatcccttccccagccccccaacccacaacaggctgtgtgtgatgttccgcttcctgtgtccatgtgttctcatggttcaattcccacctatgagtgagaacatgcggtgtttggttttttatccttgcgatagtttgctgagaatggtttccagcttcatccatgtccctacaaaggacaggaactcatcattttttatggctgcatagtattccatggtgtatatgtgccacattttcttaatccagtctatcattattgaacatttgggttggttccaagtctttcctattgtgaatagtgctgcaataaacatacgtgtgcatgtgtctttatagtagcatgatttataatcctttgggtatatacccagtaatgggattgctgggtcaaatggtatttctagttctagatccctgaggaatcgccacactgacttccacaacggttgaactagcttacagtcccaccaacagtgtaaaagtgttcctatttttccacatcctctccagcacttgttgtttcctgactttttaatgatcgccattctaactggtgtgagatggtatctcattgtggttttgatttgcatttctctgatggccagtgatgatgagcattttttcatatgtctgttggctgcataaatgtgttcttttgagaagtgtctgttcatatcctttgcccactttttgatggggttgtttgtttttttcttgtaaatttgtttgagttctttgtagattctggatattagcccttcgtcagatgactagattgcaaaaattttctcccattctgtaggttgcctgttcactctgatggtaatttcgtttgctgtgcagaagctctttaatttaattagatcccatttgtctattttggcttttgttgccattgcttttggtgttttagacatgaagtccttgcccatgcctgtgttctgaatggtattgcctaggttttcttctagggtttttatggttttaggtctaacatttaagtccttaatccatcttgaattaatttttgtataaggtgtaaggaagggatccagtttcagttttctacatatggctagccagttttcccagcaccatttattaaatagggaatccttccccattccttgtttttgtcaggtttgtccaagatcagatggctatagatgtgtggtttatttctgagggctctgttctgttccattggtctatatctctgttttggtaccagtaccatgctgttttggttactgtagccttatagtatagtttgaagtcatgtagcatgatgcctccagctttgttcttttggcttaggattgacttggcaatgcgggctcttttttggttccatatgaactttaaagtagttttttccaattctgtgaagaaagtcattggtagcttgatggggatggcattgaatctataaattaccttgggcagtatggccattttcatagtattgattcttcctatccatgagcatggaatgttctcccatttgtttgtatcctcttttatttcactgagcagtggtttgtagctctccttgaagaggtccttcacatcccttgtaagttggattcctaggtattttattctctttgaagcaattgtgaatgggatttcactcatgatttagctctctgtctgttattggtgtataggaatgcttatgatttttgcacattgattttgtatcctgagactttgctgaagttgcctatcagcttaaggagatttggggctgagacgatggggttttgtagacataccatcatgtcatctgcaaacagggacaatttgacttcctcttttcctaattgaataccctttatttccttctcctgtctgattgccctggccagaacttccaacctgtgttgaataagagtggtgagagagggcatccctgtcttgtagcagttttcaaagggaatgcttccagtttttgcccattcagtatgatactgactgtgggtttgtcatagatagctcttattattttgagatacatcccatcaatacctaatttattgagagtttttagcatgaagagttgttgaattttgtcaaaggccttttctgcttctattgggataatcatatggtttttgtctttggttctgtttatatgctggattacatttattgatttgcatatgttgaaccagccttgcatcccagggatgaagcccacttgatcatggtggataagctttttgatgtgccgctggattcagtttgccagtattttattgaggatttttgcattgatgttcatcagggatattggtctaaaattctcttttttttgttgtgtctctgccaggttttggtatcaggatgatgctggcctcataaaatgagttaggggggattccctctttttctattgattggaatagtttcagaaggaatggtaccagctcctccttgtacctctggtagaattcggctgtgaatccatctggtcctggactttttttggttggtaagctgttaattattgcctcaatttcagagcctcatattggtctattcagagattcaacttcttcctggtttagtcttgggagggtgtatgtgtcaaggaatttatccatttcttctagattntctagtttatttgcatagagatgtttatagtattctctgatggtagtttgtatttctgtgggatcggtggtgatatcctctttatcattntttattgcgtctatttgattcttctctcttttcttctttattagncttgctagcggtctatcaattttgttgatcttttcaaaaaaccagctcctgtattcattgattttttgaagggntttttatggctctatttccttcatttctgctctgatcttagntatttcttgccttctgctagcttttgaatgggtttgctcttgcttctctagntcttttaattgggatgntanggtgtcagttttagatctttcctcctttttctttgaagcatttagtgctataagtttccctctacacacctgtttggaatgtgtcccagagattctggnaatgtggggctttgttcttcatgggtttcaaagaacaatcttaatttctggctttcattttccttacgnacccaagaagtcaattcggaagccangctgggtcaantttgcatggaaattgaaagggttttgaagggaatttctttattcccgaagtcctaagtttgaatggccccgggggggccaaaccgggaaaacacaggtggggaaaaaaaaatccgggggcttttaaacatttggcggaagggaaaggcttttaccctttcccacctaattgtggggccaaatttttggaaaaaaagggggggggggggggggccccaaaaaaaaaaaaagggaaaaattcgggggggaaattttggggggggggaaaggacctcggaaaaaaagcctaattatggggcccccccttgggggggcaaaaacccaaaatccccaaaccccggggaaataccccttggaaaaaatttcggggggcccaaattaaaacggcccaaaaaaaaaagcacgcgggggggggtaaaaaaacccccccattataaataggggggggggaaggcaaaacactttttttttggagtcaaaagaacagttttttttnnnnnnnnnnnnnnnnnnnnnnnnnnnnnnnnnnnnnnnnnnnnnnnnnnnnnnnnnnnnnnnnnnnnnnnnnnnnnnnnnnnnnnnnnnnnnnnnnnnnnnnnnnnnnnnnnnnnnnnnnnnnnnnnnnnnnnnnnnnnnnnnnnnnnnnnnnnnnnnnnnnnnnnnnnnnnnnnnnnnnnnnnnnnnnnnnnnnnnnnnnnnnnnattttatagtaattatataattatataaaatataattatataatataattatataaaatataattatattatataattatataaaatataattatattatataattatataaaatataattatataaaataattatataaaataaaaattatacaagtatatataattatatatatttatatataattatatatattttatatatataattatatatttacatatataattatatgtattatatatatataattatatatataaaatatataattatataaatatataattatataacatataatataatattacataatatatattacatgtatatatattataatatacattatataatatatataatatatattatatgtatatatacatatatatacatatatgcatatatacatataatatatatacatatatgtatatatacacacatatataatatgtatatataatataacatatataaatacatatataatatacatattatattatatattataatatataaatatataatttaatatatattatataatatacatatttattatattatgtaaatataatatataaatatataaataataagataaatataatatataaattacatataatttatatattgtaacataaaaattattctagtctgatatgctttaatacaaatttaaataaataatttttatattagtttgttattcagttcttgaaaacataaactcaaaagatagctaataagattagaaagtggtcatgctatttttaagtaaaaaaatagaatatctgaattttacagagccaataaaattgactttagaaaaacgtactcaagtgttaataataattatctctgtgtgaaaggacttcaggtgaattttattttttaaaataattttctggttttctcattttagttaacaagcatgtattattttaccctcataaaaattaaacactgctcaaatgcctcctatttaatgaaaagtaaagattactgtttgaaacatacacatgccatcctcctttcctttgagaatcccactgaaatgacaaaagtgctatacaaaattgaatagacccatggtgacagtgaattcaaaaagggtagacttcttttgatggctaggtcagaataaactgcagcccacatggacacaggctgcagtggaggcagcatagccagaggggtaggtgaagaaatccacagcaggctgtgatggccatcacatgggctcagccaacccactcccagcactgcagctgagctctctcaacaaagagaatggtttaccttaggcggactcatgtgtgggtgctatgccggagaagaagagagaaaggaggcctgaggggacatgaagtgacccctaatgttcaaattgcatcctataggtaatcaaagaaaagcagacagacagtgccaccaagaagaaaatcattggagatgcttttgaatcatctccaaacacggggcagcttcattactggccaactacaatctctactgcaaatctagcactggcaagagtgttattaaaaaaaaaaagaggaaaagaagagctaattttcatccaaacatttctgtagtgtttttgcaaaacagctatctgtactgagtacaatgaaatctgcattaaagcatattttgcctctaatgggcaattccctgtcttaagcaatttcttccaagtgatcctttttggtagaatccagcacttatttttaaaaactttagttaaaatctcatatattggttacacaattaatcttcagggtagatgcaaaatgggtgtttcattgcaactctttggattttacacagtcattttttaaaacagtttcattaatgtttaaaacacatactagtaagtaaaagactgtaatatattaaaacataaggctttatgttttaaaagagaagttaaggatcccagggaattaaataatgtaatcaaaacactgaaatctgtttcaaagcagtactagttcaccgataaccaaaaaaaaaggagaaaaggggaagttccccctgcttaatgcatacaaaaaggacttttctatattgctttcacactacattataggtttccacattaccaggactagagaatgaaagaagggtatgaacatatatggaggatatgaccattttaagttttacttttgggataagacatatcagagtaacgcaaaggcaaatttgagtatttcctctcaacatgatatgattggcaaatatatacatacaattagtaatatatatgattaataatatagaaatgtaaggccttgattacaaaaaattacactgggaaatttaatgtacttctttcagaatctgacacatctagtaaaaatataggtaaagatacagacaatttgagtaacataatcaagaaactcaatttaataggaaactgaatcatcctaaatgtaatagttgaatcagatgatgattattgatggatgctaaaaacagtgggtaaaagattgttagaaacaggatatttatactgtccttaagtatcctcccacagattaaaaactaattacaaaggtaaaaatatacctttgcaactgaggttaacactgtcaccacatgaacaaacttagcattaccaatggtggaacaacctgacctcatgtgcccattagcacacaacagtatcgatgaatattcttgccaaaaatattcaacctgaatttcaagccttgacctaatttctagtttacaggaaatatagcaccgaaaagaatacattaattgttgctgtgggaaaaaaagcaagtccagggtgtggaatagtgtatgaaacaactgacctggtttcttctgaaaaaacaaaaaagaaggaaaaactgattaaaaagactaaaaaaaaaaaaaaaaaaagaccaaatgcaacacattatcttgattggatcctgaattttaaaatatcttatacgtttttgcaataactggaaaaatttaaatatgtactgataatactgtcaattgttaaaaaaatttctaggtacaataactgtactttggttatctaagagaatgtccttatttctaggtgcaacgacggtactttggttatctaagagaatgtccttatttctaggtgcaataacggtactttggttatctaagagaatgtccttatttctaggtgcaataatggtactttggttatcaaagagaatgtccttatttctaggtgcaataacggtactttggttatctaagagaatgtcctcattcttagaagatgcatgctttaatatttagataagaagcatgtgatgactattctcacattcaaatggttcagtgaaaaagcaacaaattaaaaaccattcacataattatatttaatatatatgcatattatgtatatatatggaaaggcaagaatgcgaagtgagcaatttattaataatgggtgaaactaggttaagggcatatcgatatttattttactattaggttgaaccatacgaaattggcaatacttgaccattttttagctacaaatgacaattttaccttgaatacacaaattaacataggagacactagaaaggtgacagaagacacaccattaaaaatgactgaaggaatcagagggcttcacagttgactttgatctaggttttaaagactagattatttctatattatgttatttcagaatatgaaaaaatggaaaagcctttagttcatgttatgaatatagcatatccttaataatacctaaacccagtaaagatagctccctccccacaaagggaaaaagaaaactataagactaattcaaatttattattatacatacaaaattttagggaaaaatagttatcttgagaatgtaaggataattcagtatcaggacatctattaacatatttcatcatactaacaaattaaaagaagaagaaaactgtatgattatctcaacatattctgaaagtgctctctctatataaataattcactgacatttctaatcaaagctataagttaaaataggattattttatgagtgctgagcactgctcaaaggacattaacatgtatcttttcccatttaatctttatacatttaatctccagagatagatgctgttattacccccattctactttctacagtaaatgcctaggagagagaatgcttggtgctatggtttgaatgttttttgtcccctccaaatttcacattgaaatttaatccccaatgcaacaatattaggagttgcagcctttggaaagtgaatgacattgggtgcccatatgaaagggtttgaaggaggaagtttgtccctcttgctcttccaccttctgtcatgtgaggacatagtgtgtttgtcccctccagagaaggcagcataaaggtgccatcctggaagcagagaaccaccctcaccagaaaactaaacctgctggcacctttatcttggacttcccagcttctagaactgggagaaaataaatttctgttcttcgtaagttttccagtcttaggtattctgttatagcagcacaaaacaaactaagacactgggtcatatagtaattgtatttttaccttataatacactgctaaagtgatttacagattggctgtattattttagattcccaccagcaatgtattctctctaggtgtgtagctttgtattttcattctctgaacagtgttttggcaaagtaaggtattttcatgattttttcttttatggatgatgttcttcatataatatctaagaatcctttgcctaattcaaagtcataaatactttctcttatgttttttctcgaagttttatagttttatattttgatctatgatccattttgagtcaatttctttgtaagttctgaggtttaagtcaaggttcattttttggcctacggatattgtattaggtttctattgctgtgtaacaaactaccaaaccttagcagcataaaacaacacctattagctcccagttctgtaggtctgatctctggcataatgtgactggattttctgattaggatatcacaaggctgaaatgaaggtactggctaggctaggttcttgtctggaggctctggaggaaaatctttctaatatcattcttcttgtgggcagaattcatttccttgaggtgtaaactatggctcccttttcctttctggctgtcagccaggtattattcccagctcccagaggcttccaaaattccttgccacgtagccacttccaactttaagccatgatggcgcatcaaatcctcctgaatgtatgagttcctcttcaaagacttgccagagaaaactctcttcttataaaaaggttcatgtgattaagtcagcctcacaaggtaatcttcctatttcaaagtctactgtgtcatattaagataatccatcatatttgcagttccaaggattatgcaagtcatgtgtatcaggatggggaggggcagaaaatgctgggagtcatcttagaattctaccaaccacagatagacacttattctaataccatttgctgaaaatactatccctatgccattgaattgtttgttaacctttacaaaaatcaatacgccatagttgtgtaggtctatttatgggctttttcttctgtttagttaatttatatgtctatccctttgtcaatatcacattttttggttacagaaatgttaaagtgagtcttaaaatcaagcaatctgagttttccaacttcattctttttgaaaatcgttttagctattctagttactctgcatttctttctaaatttaaaaatcagtttgcctgtatctacaaaatgtcctcctgcgattttgattagaattgtatgaaatctctggatcaatttacagaaaattgatgtcttaactatatttagtcttctaattcataaacacagcaagcctctccattaatttagttctttcttggtttctgttattggtattttgttttcaatatacagatcctgcatgtggtttgttaggtttagtcccaagtatttacatttttttgaactattagaagtggtattgactttattagtttctgtttccaattgctcatttctagtagttagatatgcacttgatttttgagtactgaccatgtatcctacaacctaaaatcacttatttctagaagtttttttttttttaggtttcttttttctatataaacaattataaaggctgaaaattgggcacttttatttctctctctctacactgtatgtatcgtctttatttttcttgttttattgcactggctaagattaccaggacaatattgaattagagttccttcctaaaattaggaatatttgtctcattcttaatattagggagaaagcatttggcttttcactattaaatatgatgttaggtataagtttttttagatgtcttttattagtttaaggaagttttctcttattcctggtttgccaaaagttttttttaatcatgaataaaaatttttattaaatgctttttctgcatctattgatatgatcatgtttttcttttatctgctaatatacatttcagtgattgatatttacctactaaaccagacttgcattcctgagatcagtcccacttaattgtaatgtgtagcctttttaagtattgctggacttgatattctagtattctgtgcaagatttttgcatctatgtgtataaaaaagattggactatagttttactttattgtgatgatgttttacttttgtattagggtaattctggcctcttaaaatgagttggaagatattgttctgcttctgtttcttggaaaagattatttagaattagtgttgtatcttctttcaaagaatttgccagtgaaaccatctgggcttgtagtttatttttttggaaggttttaaactctaaattctatttctttctttcttttttttttttttgagatagagtctcactctgtcgcccaggctggagtgcagtggcacaatatcggctcactgcaacctctgcctcccaggttcaagttattctcctgcctcagcctcccgagtagctgagattacaggtgcctgtcaccatgcctgactaatttttgtatttttaatagagacggagtttcaccatcttggccaggctggtctcgaactcctgacctcatgatccatccaccttggcctcccagagtgctgggattataggcgtgagccactgtgcctggccaattctatatttttaatagatacaggatgattcagtttatatatttcttcttgaatgggttttggtagtttgtcaagaattgttacatttaatctattttgttgaacatatgtgcagagaaaattgtttgtagtattcccttatcatcagtttaatggctgtaaaatctgtcatgatattctcctttcttgctctgttgccaaggctggagtgcagtggtgtgatcatggctcactgcagcctgtcttccaggctcaaatgatcctcttgcctcagcctcctgagtagctgggactataggcatgtaccaccatgcctggctaattttattttttgcacagatgggggtctccctatgttgcctcagactgctgtcaaactcctgggctcaagcaattctcctgccttggcctcccaaaatgctgggataacaaacataagccacctggtctggcccctcctttcatttctaatattgatgatatgagtctttttctttttgtcagcgtcactagaagtatatcaattttattgctcttttcaaagaaccaggttttggtcatcgatttttctctactgtttctctattaccaagtctattgatttctgctcaaatttctttttatctttcctcttacttgttttgggtttagttcactctctcaatgttctaatcctggaagattagattgttcatttgaaaactttcttctcttctaatataggttttcagtgctatacatttctttctgagcgctgctttagctgtattccacaaattttgagattatattttcatttacttcaaaatattttctaatttctcttgagattttatctttgactcatggattagttagaattgcattaattttcaattatttggagatttttcagttatttttatatttatttctcatttaattccattatgatcagagaacaaacactgtatgttatcatttctcttaaattagaaaaggttttatgacctatgctattgcctattttgctgtaattgtaagcacttgaaaagaatgtgtattatgctgctgttgggtagagtgttctataaatgtcaattaaatgcagctggttgttagaatagttcttctgtacccttgcagattttctatctacttgttatatcagttactcagggacaagtactgatgtttgcaactgtaagtgttaatttgtctctcttccctttcagatttatcaatttttgctttatgtattttaaagctatattcttaggtgcatacacattttatatagttctgtctttttggaaaataaactcttttatcattatgtaattccctctttaatccttggaaaattttcttgctctcaagactatttgatttaatatagccactccagcttcattttgattggtgtttgcatggtacaccttttttcattcttttacacttaacctatctatatcattgtattcaaagtgtgtttcttatagacagcatatagctgagtcttgtttttaatctgccttgacaatctcttttaactgatgtcttcaggcaatttagatttaatgtaattattgttatatttgtatttagatctatcattttattacctgtttccagtttgttttctctatttttcccctctgttttcgtctcctgccttccttgaagttatttgaattgatttgttttccattttaatttacctattgaacttttgactatatctcattgtgtatgtgttttagtggttgatctacaaattacagtatgagtatataattttttacaatacattttgaattaatagtttaccacttcaagtggaatgtagaaaacttaccacttacaggtccctctactcactttcctttttgagaaccccataagacaatgttaaaatttttccttcaataaccatacatatttttaaaaccttaagaaaatatattaaacagatatttactatttctgttgctgctccttcattcctgctgttccaagattccctccaataccattttccttccatatgaatacattcctttggcattctttttttaaagagcagatctgctggtgaaaaatgtcatacttttgttcagattagataatttcttataatcttcaagttcacggaatctttcatctgtcatcctttattttgtttttaagctaattaagagaatattttgttttggtcattgcattttccattctaaattttttatttatttatgtatcttctatttctctacagtttttttttcatttttccatttgtttccattgtgtatgctcttacttcttggggcatggttacaatagctgctttaaagtcttgattcattaattccaatatatgtgtccatactgggttagcatcttgtgaaatattaagatttttcctggatcttgtgagacattaagatttttctgggtattcatatgctaaaaaaattatagaaatttggatactatgttagataactctggatctggaatgttaagtgacataggattttcctggggagaatgttgagattttgttttaccaggtaatcaaaccagattttgtccagaatgcaagttcttatctgccttctgttgctggttgttccaatgtcagttaagtttgaaagtctttgcagttgtctttagatttttcctgcatatgtgatacccagtgtccagttggggagctgggtaatgttctgacttatagttcatttcttattgtcttaggtgtatgctgtttaggctcagacacatgcatatacagcctaattttgagctcgaaaatttatagacaactttatagggtcgatttctcaaactcccttctctctacaatcttctctacattttctaccttcccaaagcctcttttcctggtcctctggctaaaaactcagagttttaattttcccacagtgctgcatattttctatgattttcccataacattgcacctgtttccaaggctaatcggtgagaggattaagagaaaaaaaaatacaatgggaattctcccccatgatcttaggaccaaagttcctctggttgatattttagctgcctttgtaactgttgctgccatcgtcacctgtcaccttatgattgctgggattggggaaaagagaatgaagaaaacaacaacaaatctaaggcatatgtccactcttctgacccacaaatgtcccctttcctttatcttgttccagaaacaaagaatttctcttgtagctttctctctctttcttattttataattctggtgttaaattgtctatgagtccaggccaagagattccagagaggaaacaaaacgaaaactcaccaccagttcaatagtactctgaattctggtttattccccgaatatgtctgttaccatttactttttagaatccttgtataactgctacatgctttgttcagtgtttttagctgcattcagagggagagaaagtgggtggagtaagtgtgcttactccattttgaccagaactggtacccttctccacagcctttgaataacaagttccatctactgcattcaaaatcacttttttttttcaaacgttggctgttacctaaagtacaaatacatctattacttaaagtaaggacaccatattggataatgctttatgataacaggctaataagtctcctttaatagaccagaatgtccattgtttggtaaacttagtaaatgagagaagcttattgataccgatattctcaagagcaccttcagagaagacgactaagaacatggcttgtggatgatagctggcagttgtggagttaaagactgttatctctggacctgagacaatttggcacacagaaataaagcgtattaaagaacccagatggcactgaaagcaaatttaggaactgctaattcataacaattgttataaacctagaatatttttaggttaaaaacaagttactatagttatccaatatctctaatgtaacaagtcaaactagattgatttaagcaataaatatttagatttatgaaatgtattgtagaagaacataaagaaaatagaacaaaactataaaaggcagtaccaggtatggaataaatctacattcaaatgagtaaactggttttccatgtttcatgagagagcatatttctcaggtctgcggattgacattgattaaattgatacaaagtatacaaatttgcagaaaatcactacaaaatataatacaatcaatacagcttgatgaaatgttacaaattaaatatctaaaaagttcccaagcaaagattattatgttaagaaggagatagaagcatgttttagaaagaatctttttgagctattggataatataatcctttttgtgagcatttttctttaaggcgtttatcattttaaatgcagaaataggagttgcctgtaaaattggtgagtctaattactatggaaaatggtctaaaccttccagagactatttctatttcccatgtataccatgctttcataaatataattaattaataatagtttatatgtgtatgtgcgtcagggggacaataaaatagtatttgggtaagaaaaggctcataggtatcctctggtactgttatagcaatatttgttgagcacttactgtgtgccctaaattctgtacacacagaatgctcaatccttataatgttcgaaaggggtagatatcattattccaattttacagattaagaaatttgaggaataaagacattaaatttattgctcaaaatcctacagctttaagagagggaggcacaattaggacctgctcagtctaactccacagtatatgtgtgtattgatagactacattaatataacaatgaagcaaactgttaaacccacatgaaactttgaatgctagaaagaaaaccaaacagaacacaatcaatattaagataacttaattatatatattcctccattgtattaaattaacatttcctcacctcagtaatcaaggaagtctgtatggaagcagatatatttaactctgctattatttaagacttaaagatattactaaggacagttctctttttatctttgtatacatatttgtgatggctgttatcttaaaactttgtagccaatgggtataaatgataaataaatcatttgaggatggcttttggtcataaaccaaaaattgaatataaatatttaagtaaaatattgattgtgggctggtgtggtggctcatgcctgtaatgccagcacttcggaagtttggggttggaggattgcttgagctcaggagtttgagatcagcttgggcaatgtaatgagacctcatctctgctaaaaataattttaaaaagattagctgggcatggtggtgcacacctgtagtctcagctacttgagaggctgaggcaggaggatcacttgagcccagcagatcaaggctgtggggagctatgattgagccactgcactccaccctcggtgagagagcaagacactctcaaaaaaaaaaattaatagtagaaggattgcactatctaaaagttactcactctgcaatagacgtaagtcaatgtatgctaacaaatttttttactgatttggggaagaggctgacggcaggatagtttgggatcctgaatagggttgggagatgagcatgagggtaacaaattcctataagtaccgtaattctaaattcctgtaattgaggaagacaatcttctccacttggctactttggactaatctcattttatttacccgtaactgtcccaggtcaaaaagaaaacctgcactgaagaatttctgtgttgtatgagccagtcagcccaatcacttgtgatggatgaagatttcctgtgtttgtttttaacaggcctgtcttggtttaaaaagtacatttctttcttcaaaggatttgttaatcagggtagattgcaggcattgagaataagctcatttattcagggtgccagaagaatgcactagttgagtgtgcaggccctaggcttaggctccccagattggagcctgattctgcagcctggcggtggtgtaaccatgggccacggtggcagttgtcaaccaccctgggaagcggctactatcatcatccccattttatagattagaagctgagtcacaaggaggttatatactttgcattttattatctgatatcttggcacagagtaagcactcaatacaagtcagttattattggtagagtgtttagaggtcaaaatttggaagctgtaaaggttatcttgttgagggcacttttctaatgtcagctgggagacaagttctgtgttagtctggcattcaaggccttccacactgtgattcagatattgtgaagagatgggtcctacattctcatctggggagcccggggaaggtttgcactgtggtatgggctccattctcatgagctatttgctgaaagtttcttggctccatgcggtgctctaccctaagccaagaatggggttaccatcttgaagcttattatctggtgccactgccagagagctctgccctgtggtctttaatgtttatttgtaagcatgtgcaaccatttggtcgataatcttgtttactggcttttgtagggcaaagcctaacacctttggtcttttttgtttcctgggtaacagcagagctagtccttggagactcctgttgggttttcctcaccgccagtattaatgtattccacagaagggaggagaaccggattttaatcaagaaaccattctactttattttacatgaaaacctccaaaataatgctggaggagtcttttccttttctccagaattttaaaaagcaaaggtctgatttattttcaatgctgcattacaaacattttatgattatttttaaaaagaaaaatacaacagctccaggacaagaaatttgaatggtgcttaggacaagactcaatcaatggaaaatttggttcacatataaagatcattatttgtttctctaaacataggatcattactgttttaaagtcagttccatcaaagtgcaattcatattaatactatcaatttttgctttatataaaacattttctttgcatcctactgtggtagtttgcagctggatggcaaattttatggggattaaaaaaactaattcaagtacatatcaaataatttcagagaaaaaaatatagactcaagaagggaaggccacgtaaagtagataaacaaatcacattccaattgagggtgtttgggttcattcaatatcacgtttgtcttcgtgtctcttgggtttctccatttgtgtgattttattaaagctccaatttacttacttcgtggtgtttttggagaagagtctgacaagaaagttggttaacgagatatagctctgtaaacaagcaaagccttgctaaatagagtctaaatgatgggtgactatgagtttaaagccataatggaattgagaatttctttgacaacattataaaccatggtaggaaagtggagcatatgatggtatcactgcaagttagtgtgtatttgtatacacacagtgacatagttttattctttaatgtttattctattatgtcctatttcctgcccactgatcggtgcacagtgactcttcctctttaagtgagcccctcctccctttagtataggtgctaaggaatctacactgcaggctcaggtgtgcctggcccttggcaaccctgacatctgacagtatcaatattagctccatctccactagcggtaggaagtctaaaccagcgattctcaaaatgtggccctgggaccagcaacagaggcatttcctggatgtggtagaaatacaaattctcaggccttgaccaagacctactggatgagaaacttgggctggggcttagcaatctgggttttaatgagccctctaagtggttctgatgttcattcaagtttgagagccattggtcttaactttttctgccctgtatctatctgtctgggtttacttcctgggtgcccacaaatctatgaacttcagtttttcccctttagttttctcatgattgggtctctggtctctttgggtttctgccctgatgtcagatttatactctagttcccagctgagatcatcaacttgctcactagactggaaccctgtcagctcaattccctaaacacatcacagtcctgcctttactcatctccctcctggctggtggccaagtctggcactgaattggttgggccatttggagccggttcctgctggggcatcgccatgacctggctgccccatgctgtgccccctggaagactgccataacactggccaggctgactaccaggcacttcacccctggacactatggttcacatcagtatctctcctttcttactaggctttgtcctataacctggataactgtcctaacctgtttaaagccccactataatactcccctctccctgctggaccagatattaaggggctgcataagttatgacacctatttgaagtcagtggatgcttttggaaaacactttaagggagttaggtaaatactttaggataaaacatgttactgatttggggacaacttcttttggggtagaaaaagaaatagtagaaaacaaattatattttattgctttaaggaaatcctgacatcactactttatgttctgaatatttgaactcacctaatagtgtattcagtacttgcattttgtggggaccagcatcctctaacttggtttccaagccctaatttttccatgcaaggatctacctattgaattttgttttccagaaacctaaacacaccaccgtcttactaacagttcacaggagactcagtgttatagagtttaatgcaatctgtgtactcatccatgggagcctacaggtaaccaccactgtgaaagaaattgcaagtcacatttatgtgcctaggaagtaattcaagaagcatttgaaaacactccctattcacctttagtcaaagcctttttatgtgtttagcaatattctcagtacttcaggaagtcctttttttccttgaatttggtttaatgcataaccagttggcctggtttgagcataaggtttcttatactaaacttgtgagacctgcagtgaatggttaatgaaagtgtttacatttgtggttgtattcatttaacttttcatgaattatgtattcaatcctactatgtgccaggcactatactaggtgctgtaataacagactcttgactgtaagaatcttcttggaagtccttttctagtcagatggatctttacgtgttgaaggcagtaggtataaatctgtcttatagataataggtaggagtcaggaagggactgcatgatcatcaaaatgtatagatttgataaataaaatgtgatttgcctaaagcactgttattaccttctgggatatgaaaatgaggacccaggtcacaagaacattaaacaaagacagccacactttaaaatagatttaccccttttcacaattgacaccagctacccgtttctgtcaaattgtctgctcctcccatacttcaggtttatagcaatcatcttccagaactgcttattggagggccactgactgaagcctttatccccttttcctgtatgaaagtgtctaacttgtgtctatagcatccctctggctaagcatatggctcactaagcaagtatgtttaagcatttcctatgtccctgtttctgttgtaagtgcggtgaggaattaaaaaacaataaattcactttatcctttgtattatagatttctctgtatcagtcctactggattgtatcttgaggacaagacctgtgtcttatttttgtaaactccacagtataccacattgtactgaatacagattgttgaatggaagaattgatagatgaataaataaatttctagggacagactataaacagacatcatcctaggatttggaagcctcctggaaaagtcagtgtggttggtactatgtcatattgtttcaccttatgagtgaaggtcaacttgactgctgggaaagttagggtaggacctgccactgtactattgactaagtcagcaataccagaaattgaacagcgcagccatgcctcataatgatttcctttgctagacggtgtcactcacctgatctgaagccaagtcaacatgggggttgttcctcctccaaatacccagacagtgaagaacacgaggagcagcgtagtggtaaacatcatttgtttgggctgagattctgtgttccgaatagctaaggcaaatgcgatcgctcctcgcaaaccttgcaggaaaaaccaaaggagaaaataaatgccttgcaggtgtctttttcatttcaatggattcatctttacaatttgctgacacaatttttttaaattaatctttttattttgagataattatagattcataaagagttgtaagaaataaaacagaaagacactgtgtactatttcttcagtttcccctcaatgatatcatgcaaaactatagctcaatatgtcaaccagaatattgacattgatccagtcaagataaagaacatttctggctgggtgcagtggctcacacttgtaatctcagcactttgggaagttgaagtgggaaaatcacatgaagtcaggcattcgagaccagcctgggcaacaaagcaagaccctgtctctacagatttttttttaaattagccaggcatggtggcatgtgtctttagtcccagctactcgaaaggatcacttaagcccaggagttcaaggctgcaatgagctaggattatgccatcagtctgagtgacagaataagtccctggctctaaagagagagagagagagagagagagagagagacagaaacatttccatcaccacaaggatccttcacattgcccttttataaccacacctacttccctcccacatactcactccttaattcctaacaaccagtaatctattctctgttaggatgatttttgtcatttcaagacagttatataaatggaaccatgcagtatatagtctcttggaattgcctttttttaacccagcaaaagttgctggataatcattcaggttgctgaattattgacagttgttcctttttattactgagtaatattccacagtctgggtgttctacagtttgtttaaccacacgtctgttgaagggtatctgagttgttttcagtttttggttattacaagaaaggatgctaaaatttacatacagattattgtgtgaacgtaagttttcatttccctgagatatatgcccaggagtacaatcactaggtagtatagtatttgcatatttaggtttttaagaaatcactcaattgttttccagagtggctgtaacattttacattcctaccagcaatatataagtcatccaatttctctgcctccttggcagattggtgatttaacttcttcattgaattgcttttggaactccatcaaaaaccagctgggtatatttgtgtaggtctatttctcagttctgtactttgttccattgatctatgtgtctgtccttcttctaatagcacactgtcttaattactgtagctatataataagccttaacattgggtagagtgattctgcccaccttatttcttgttttcaaaattgttttagctattctagttattttgcatttccataaaattttagaataatattggctgtatatacaaaagaaactttctgggaacaattactttttaaaaatcaaatgtgtcagacaacaaagaaaactaagcttatggaccactgaaaattaaataattaaatgacatttaaaattactccagaatgattacatagttttacaaaatctataatctaaactagtatattaaaacctgttttttcttattttactttttcttttgtaatattatgctaattgcatttttatgaatccatattaaatatatttgcaagaagtattaaagatgaagggctgggcatggtggttcacgcctgtaatcccagcacttcgggaggccgaggtgggcagatcatgaggtcaggagtttgagaccagcctggccaacatggtgaaaccccatctctactaaaaatacaaaaattagctgggcatagtggcgcacacctatagtcccaattacttgggaggctgaagcaggagaattgcttgaacctgggaggtggaggttgcagtgagctgagatcgtgccattgcactgcagcctgcatgacagagtgagacttcatctcaaacaaacaaacaaacaaacaaaaaacaaatactagaacttgaaatcgaaacgtgatgacactaataaaaatagaaatatagacttggaagaagagtaaataaaagcacaactagcaaaggaaaggagctaaaatggaaggtctctcttgggtaacacacgacatgcaagacatttatagtccctgttatattgtgcaataggacaaataaagatttataacgacacctagtataagccaaagaggtagtgatttggttatttttgttgaaaggtttgaatcatacatataaaatctcaatgatccactttttataatatttattatagcatctaggtttctaaatttctaaatctgtattcgtacattaaaggaattttaaaaagtagacacagggcagaatgagaaaaactataaccatcctggtttttgtttctaggttctcaacttagaatataacgctcctttcttacctccatgctgagactattcaagagacaagtggcataacacaagagccacaggattcgactagagagacttaatatgttttgcctgaaacaaggaaatctccgaaagagagaagaacatgcactctgattataaaataccttcaaggaacaaaatgtaatggaggaaggaaattattctaaatctccacgtagacatggaaatggcctatagataaggaagataacatttgaagtagatattaataaaaaagttcttacacatcagaaattctgaacacttgagatggctgtactcaagaaaaaaaggccccaccagaagtatttgtgcattcatacccagctggggataagagtggggatattaataacccttaatactggtgactattttaatagtgttctcaccaggaaatacaaatgggatcattagggaatgagaactcaaggaaacagtcgtacaatagacttctgtatctgaggagagaatttataggtcatggtaaagcttctagcagtgtttaatcatagtacaagattggagatagaaagtgaactttccggctgggggaggggtggctcacacctgtaatctcagcactttgggaggctgaggcgggtggtggattacctgaggtcaggaatttgagaccagcctggccaacatagtaaaaccctgcctctactaaaaatacaaaaaattagctgggtgtgatggtggatgcctgtaatcccagctactatggaggctgaggcaggagaatcacttgaacctgggaggcggaggtttcagtgagccaagatcgcgccattgtactccagcctgggcaacaagagcgaaattctggctcaaaaaaaaaaaaaagaaaagaaaaagaaagtgaactttcaaatttctcctttcctcaagctcatagtgatagaaatgtccataaagcagcaccatggcaaagtacgtaacattagaagtattagacaatcagttgctaagtattaatagttctcattgatataaatatttgtagttttttaactttgtgtctctgtgacaaagacgagaaactagaatacaaattaaaacttgcaataagatgcctagtatcaactatttcatgctggatattaagggcaaggaggtaagcaatcattaatcttactaagaatgtttaataatgtattgttattatgttaaactagggcaactatgctcttaaatctaaattatctatacatgagcaattcttggtttaaaaatatactcaaatatatgttatactgacttttgaaaaaatctatatctatatatagaacatctatatttacaggagatgcaatgcagagatttcagaaacaaatggaaaagtacagccactatctcgtggcaggttgagaaacattgttaatcggggccaaaccccaagatgttgaaaagaggatgccttctcaatgttataaccacctaagaaaacatagatacagggtgttcttagagatgggatcatctgtccatagccctggtaacatgtggcacgcacggcactgcggcactggaagcacggggctgagaatggtgaggctgccgggtggacaaagtgaagctaatgtagaactccagatgaggtggactattgtctatgtcctacccatcctttgtgactctgaagttgcttatcatacatttggagcctagataaatgtgaaaccaatgcttcattcattgattcatttaaagtgtgtgtattgattacctcctatgtggaggctctggacatattgatcctatcttcttaatgctatggttttgggcaatagaggattttaggattgaaatagattattagggtaccagcaaaatactaaaaatgaaaaatgaatattgacttaggattttctttttagccaaacattatttccaaaaaacacacaccatttctcttaaaaactcaagaaatctagaacttgtcaaaacttgtgttttgtattgttttatgaatactctgagtttgagtctttgggttttatctttctttttctttttgttttggccaactaatcaaaataattttatacttttgagggtcgacagactataccatttcattttaaatgggtttactttgcagagattttgacatatttcatatgcccagttggaaatttagcatcaccttggggaataaaggaattacctgcaattaaatgtggtttcatttaaaattgccctctaagggattcttatgttaattatgttgatgttctattcataacaatagaaaactattgaaccaaggaaagctttctagcaagcactcgtgctgcagaaaatgtgcagcttcctgtttatcttcaaagggcaaaagtgaagcctttaatcaattacaaatttgcaaatgtgttctgaataggtgaaggtcagacataactaaacttaaatcacaggaatataaatatttcttagggcatcttgatttaaggtgcaaagcaataaactaaaagcatttcctgagcactcactatatgctaagctttatcccagacacagtacaagaatgacagtttggctgctctgttccagtgttcatggtcctacaaacatgactcttttaaaaggtaaactgtaagaaggtgtattagagatgcaaaagaggatactttgaaagtatagtttgatgaggaaaaagattgctatacctcatgagggcccaaatcgtgagcatcgtcatgaactgatgtgcagcatttaaggcactgaaataaatggtgaggcaaaagagacctttgtgtacataattttctatgcccaaatctttttttctcatctaaattttctcagttcttttctcctataaccctcatcaaaacttcactgaattccaagttgtcttcagagctcaaatgagacactgttttctccacaaagccttctctgacatctgggtctgggttaggctgggttatattcctaacacaatccctgtttgccctatcagagcccttattactgtaccttgcaattggccagttctgtttagctgtgacatctaaagcaatactaagcacacagtaggcactcaataacgatttgtccaacaaatcaatgaatggatgaattttctgattcttcaataatgtctggttacatacggaaaagtgattgatacctcctagattaatgtaatggtttcagaatagtttctacaagttcagtttctgccttgttattatttattgagatcctttaaaaccttattttgagagtcaagagttctggtatctgccctcaggcctgccccacaggctgcatgaccataagcaggttacctcatctagatttctgttacctcatctccaaatggaggtttacaactagacttgtgtttttttttttttcactagaagtgcacatcagaatcacgtggaacttaaaaatatatgtagtcactcacgccagcatcccgactagagattctgatgcagcagaggacgaggtatatgagagcccagctcctctcatttcccactgcaccaccttggcctaagacccatctcacaacctgcctgtgccccgaaccactctctggtcttggcctcaagcctctattctcttcttcttccagtccatcttgttgatgttcctcagaacagcttcctcaaaacctagctttatgaggtcacgattcaactcagcaagaagaacccagtagcttcccacagcccagagatacctctcactcagaaccccaccctacttttcctgtttacttcctcttctccattgagaacttccataagcaaggcaggtttctctcctcccataaatgactgttatccccacctctgtgccatggcctcaccattaatttcttgcttcagtgctggatttctgcctttcctttgtgcttctccaaacttcacccatttgaacgatctttcttccctcatcccactcctatgaagttttcctggaatactttagtccactttgttctctctttcttagaaatctaatgaaacatactgcccatgccacttgtattattaaatcatagtctgaaatgaatcagtactttaatgtggtctttttctccgactcccaattttttagaagtttggagttatatctccttacatagttcttatgtctttcataatacccagaacacaaaactctgtaaatgctttcaaatcgaactactgtagtggtttcaggccctctagatatgggatggtgatattcatatattcattcactgattaattcattcaggctccaggtgatagtggcaaacaagaccttaatttaaaggtgtttctaggttgattatgtcaggtggtatgaagaaaaccaaagtagggtaaggggacagagagtatttatatgtgaggggagggatgttagcatggttaggaaagcctctctggttaggtgacatttgagcagagaacctaatagagggagaagccatctgggtatctggaggaaaatcattctaggcttcgggaatagtaggtgcaaaatcctgaggcaggccaatgcctggtgtgcttaagctgtggcaaggaggctggtgtgatgggagcaggataaacagggtggagctgggaggcagtggaaggagataatgccagagaggtgacatagccaaatcatactgggcttttgaatagcaaggcttttgaattttattttgagatagtaaactttaggaaggttttaatgcaagatagtgataggatctgttctatgcttaaaaactctgactctgataggaaaacaggttgctgataggaggccagtgaggaggctgccttgttagtccaggcgagaagtgaatgcagatcagaccactgatgatagcacggcaggtgctgaatgtatgtcaaaggttgatgtttgttgatgggtcagatgaggggtatgagaggagaactcagccctggaagaattggggaagcccaggggaagagcatgtctgggtgtataagggcgatcaagggttgtgttcccgctttattacatctgagctgcctattagtcttccaagcagagaggctgagtgagtgattagatatgagtgtggagttcaggggaaaggttaggatcttttactgaagagagtagaaagatatgaggatagttggaagcttgaaaaatgtaggaagatgaagtttattttgaaccaggtttgttcttgccttgaggcctttgtacttgcagcttttcccacctgcagtgctcccctgagtcatcccttggctgtgcccatcatctcagtcctcagaaaggctgccctgaccatcagacctaagtgctctcaccttcacccaggtttttttttttttttttgagacagagtcttgctctgttgcccaggctggagtgcagtggcacgatctcagctcactgtaacctccgcctcctgggttcaagtgattcccttgcctcagcctcctgagtagctgggactacaggcaaacactaccacacctggctcattttttttttttttttgtattttagtagagacagggtttcaccatgttggtcaggatggtttcgatttcctgactctgtgatctacccgcctcggcctcccaaagtgctgggattacaggcgtgagccactgtgcctggccgtttgtttttcattgcactgatcaccatcggaaatgatcttgtttatattctggtctttaagatctgtctttctgtgctggaaagtacgcttggtaagagctgacctctggtttgctgcctctgctgtggcatttccagagctagatggcacctcttatagggtaggtgctctgcaagcaatggatgaatccataagtgaatggataagaggaggtcatttttgtgtttaaaagtacaattagaggccgggtgcagtggctcatgcctgtaatcccagcactttgggaggccaaggcgggtggatcacgaggtcaggagatcgagaccatcctggctaacacggtgaaaccccgtctctactacaagtacaaaaaattagctgggcgtggtggtgaatgcctgtagtcccaggtactcgggaggctgaggcaggagaatggcatgaacctgggaggcagagcttgcagtaagctgaggttgcgccactgcactccagcctgggcgacagagcgagactccatctcaaaaaaaaaaaaaaagtacaattggaacccaaaagaaaatgagcagtagatggacagggatgagaactgtccctgataaatggatctatcctttaaaagaaaagtcctttagatgcattattttgctgcctgtctttccatttgggacataatccattgcaattcctttttttcccctttcacttcaaatactctgaagaagttgatttaaaagatttaatacagtcttattatcaatctgttaaatcaaaccctggtttgggtctagaattgaattacatttcgtttttacccctaatggaatcctgtgactttgcaaagtgtacctactttaagcaaaaatgccagtctgatttcaaaatgttccaggataatgcaatcttgctacgtggttccattttcagttcaacatcattttatcacatggaagtgaagccaacagattgttttcagtaggaaaatcttctgcattcaaaaataaattgagttcttctggaaactaagcctgtgttagacaagtagagctttccctcgtctctcttcctgaatttgaatcatttaaacttaaggctactaagaagaaatgtgatataacttctgtgtatttttatgtaaagagaagtttgtttttagaagccctgggtagccagaaagggtaattgtaaataggattagctctgtcacaactctgaagtcaacaagcatagatgcctctggctttggaagtttgtttttacgtgggtaagatggatgtaatagtaaactgcggaataatcagaataatcctcattactagctgaaatcttcaacagagagtttcaggagaaaggctaacatagatcggaagaaagtcaacattctgggagtagtacccaacttatgggcagcttgtgttccaaagatcaatttatcaattttctgtttaggtcagtgttttcttttaactggagtgattttgatccctagggaatatatggcactgtctggagatagttctcattgtccacaaagtaggagggaggagtggggaggcaaaggtgctactattatccagttggtagaagccagggatgctgttaaacattctgcaatgttcaagacagtctccacaacaaagaattatctgccccaaatgtccatagttgctggggttgaggaaacctagcataagtttccaatttggatctggaattgctttttcccatgtgacattataaataatgacaatattcctactgcagaggggtattttggcaaatatggctatctatccaccaaaatctattcttatatattccatgatgtactgttataacttcataaactatattttctatagcagctcttgcagctaggtacagccacgtgactggttctgaccagtaaaatgagagcagaaatggtgtgagtcacttctggtccaaggcttttaagcagcagcttcttatccttggctttctttctcctttcaccagctgcaaatcatgaagtggttcccaaacataagctatatcaaaatcacctgaagggcttcttcaatttttttttttttttttccccctccccccgccgccccctcccgccacccagatttcagggctctattctgagagtgtctgactcaggaggttcgtggtaggtctgagaagctgcatttctgacaagctgccaggtgatgccaagactgctgctccatggaccacacttctagaatccttgtcttagggagttctgaagtcgtaagatggaagcagccttgttatatttgaatcaccgcctgtaggaggggcatcccccaaaccccacccagttccattgttacatcaaccctggcttgtgacatgagccagaaagcaatggctactgtgattaaactgttgaagtttgggagtctgtgtgtcacagaagcttatattatcctatggttctgcgtcaacctatgcaatgtgtctctgtagaatcacagactattttttaacagctgaggaagcaggtgctgggagagcacctatcccaggttatccctattgactcacctgtgacaaagcacaaaaatcatagttagagtaagaatgtgagttctaaggacagttgaagaaaatctccttcggcttccctaggcaaagggtcaatcccaggcaatgtgttcagcgggtgttcagcctcttgcccactccctaactttctgtggctttctctcgctctagctctgcccctttctccagcatcactggcacttggggccttcatttggctccaagttctccccaagccaccctaatctaaagtgatgtttttgactctccagtggaaacttccatctccttgggcagccagaatgagcttcatgccaggaagaaggcaattggaagaaatctgttaaggaagggtagctcacaatccttcctgagaggagtgcattttaaatacttgttaacacacatgctttcacttcgacttgtggcatttaaaacagcttcaagaaagtgcagtgaaatgtttcagccactgtaggaaatgtggtgcgagtgaccaggttcctctaaaaggaggggaagcctgtgaatgacaggcagggcacacacttgccctggggtctcctccttccctcacatggaacccccagttctcgaaggtgcttctggagcagtcttccaggcagagtcagcaggaggctgggaggtggggctaggatcctgccctactcacagaggcttggtcagtctgggaaggacttggctgacaaagcagcatttgaacctctccaatatatcagaactaatgatgaaaattcttaaattccttaatgaccctatggatggatacttagcacaaggcattttaaagtgtaactgcttcttgctcatttgcacatataatttatttgagtcaatcttattgacttcttttgaactctatccacaaaacctgagggcagaattagagggatttgtgcctggcacagatagactaattttttgaacatggtttgcttgtgttaatagttttctaaggtttcgtctacccaatgccaacacaagcaagcaattaataaataaattcaggcagaatacagggaaaataatgtagtctatttgtttgcctctgtggacatgttaatttggttaaaactatcagatacttgtgatatctgtgacactttggatatcctaaaaatctaaatgtacacagaaggctcctgaacacagggagaggtgacacacattctggactgtctccttttattactcagttctctcagaggctggcatgttcctgttgtctgcaccacctcaatacgtaggacggtctgattatccacaagatctcgctagtgtttcacactcaataaatgtctaagcagattgtgacaatttatatgtgtgaacttgttggggtgggggcacaatatattttactcacagtaactggtattttgagtcgcaacattttttatttgtttatttttatttttagagacagggtctcactcttgcccaggctggagtgcagtgtgtgatcatagttcactgcagcctcccactcctgggttcaagtggtcttcccaacctcagcctcctgagtagctgggagcccaggtgagcaccacctcccctgcctaattaaaaaaaaattttttttgtagagatggggtcttgttttgttgcccaggctggtctcaaactcctggcctcaagcaatcctcccactttagcctcctgaagtgctgggattataggtgtgagccaacatgccaggcttgagttacatgttttgtttcatgtattgatgccaggagtaagtcactgctggaactaaaagtaaaatatcaatgattgtccttaaatggagggaagagagcaggagccatgggcctttgtcttttacagggatgtcactaatgattgtccttaaatggagagaggagagcaggagccatgggcctttgtcttctacagggatgtcactagcccttagcttttacctcaggctgtcctcagcagtgatttgacagtcaaaccttttttggaataaaactctcagtctctgatagaatgttttcatgacaccaggtgtgagattgagtcctatctctatgaaagcactaaaggctgtcttgtcatctctggtggttaaagaaagtaaaagaaactcccattgtgagtatctcctaggtggtagtccctgtgccaggcatattttacatgtagattctagtttggttttcaacactgaccatttaaggtaagtattaatatccccattttacagcctagggcactgaggtttgaacgggtttaatcacacagttccaggtggctgagccagcttcaaagcctgaattcactgtacttcatcaaaacagtagttcccatctaaaaaatattgtggtgtgccaaatagcaaaacctaactggctggttaaaaatgcaagagcaggtaatttttatcgtaaatttattctggagcaaagtgaagaatgataatgcttggacttaataatgggagaaaacaagtgtatggggcaggccacagttctaagctatttctcagatattctgaattcatcataatcacataaccttttctcagcattggagactgtgaggacttaatgggatctgcaattcatatgggtctactatacttgtctgcttcgtcacagcaatgctgcttgtggttattcattatccgagatgacttttccttgtgattgcttgacacagttgttaaaacattttttttgtggctcatttcctgcataagctggttaaccctatcccatctggagacctcagaagacctactcccatagctttgctcactaatgcctgctccaagctgcgtggggcaccacctgggagagatgagggcttggtggaagttcgtcttcttaaatggagaaagtcctgacctctgcccggttagctgttagtggccttgtactggtgaggaagaggcagtggcataattaaagacacaaatatgcctagggtaggaaggagatgtagcatgggaaggtaaaagaacactggactctaggcaaaggggctgcaaagaggtaagcttggacaaaggattcctgacagtgtgatggtatcaaatgggctaaatcaagggagggaaggaaagaaaagtccagcttttagaggagcccagactctcagctaactcttgtagataaatttaaagaaatcttttttcctaagctgaagttgagtttagcctgattcttgactgagtgaaatgtacaactttagttgggtatatcattcattcacctatttatataccaaatatttatagaagcctactcaccttcaagtagcgtgctgggtgcttaggtgtagagataagcattttggattcactaagcttccagtctagagggagtatgggcaggcaaactaaaaatcatggtacagcttgatgactactaggggaggagaagtattgggtgctatggaaacagatgagaatgatacaaacccagaccagagaagttacaaaggcttgttatcagaagggatgtctaaactgagatccaaagaatgaaacaaataaagtgagtgagggtgggtggatgtggaaagggttccaggcataaggagagcctgagtgaatagggaggaagaccttagcatgctgaaggaaccacaagaaattcaataactagataagcagcattatgctgatcagatggcaaatggaagaacaagaggcaaggctggcatctaggagggtctaaagccaaacagaatgagatgggagaaatgtattgaagagagaggttcagaagaaaaaccatgaattgagattatgttctgaaacatgcttctcaaacttccatgtgcacatgaattacctagggatctgttagaatgcagatttggattcagggcttctaataagcttctaagggatgccatagctgctggcctaaggaccacacttttggatatcaaggatcaagacagcatggaagtgtcccctttacatggggactggtaattactgtgggacggtcctggtagcttaatggagttccattagcctggatagtcatagacatggattcttatttctaggcactgctgaaacaatgaccttggttcttcacttgagttccatttatgtttcctttctggctgtcattgatgtctgctggataaggtcactttgggatcaaagtgtcaaattggattctcaccatggcttgatcagttggtcacccaaaagacactgggaaaggtggtctacaccttggcaggggctcttaaaaactgtgcttctatagaacactggggttccatgagctgcagaacagtgctccacaaaacttgagtagcaatggcagccttttcacaactgagaggggaaaaaatacatgttcatgaaaaaattttcttaaagtttgtcttccatgcctttttcttaatcctttggtgtcagcagctatttgaatgtgaacgagtgctagtgcacaacaaaatgagtcaggaacattaatagcacagcttggcaacagttagtgctgctgtttcatggttatgtgagctcatggatgaagttttgtataaatccatgtactgtggtgacattttaccggttaaaacttctcgtagtttttgtgataggacatattggggtttcaatgccttctcaaaagtgcagcagaagtcaatgaatttgagaaacagtgttcgctgacatatcatctggctcctacaaccttcccaggtgctttcctaaactccctccttgttagacaagctcagcagctctgcaccctggctctttagctcaggagttcacagtacccaagtcacagtggtttcaggaaggctgccagggctaagttgggcttggcatttcccctccttccagcaactcctggttcttatttagttttaaattaaataaaaattgcagcacatagatttgagttaaaacaagtggactgatctttgtaatatgcaccacatcaacaggaaagctaatttgtgcaaagcacatctcctcctttaatttaaacaacagagtgttgcctttttggtttcaagggaactgagagctgaggcggggttgttcactcgtggcattaactagggctatgctcaagggcaagaggaacagtttcaggggcgcttagcattcctcttaagccctttgtgctgagtgtcacacgatatagcagagcagttatgacctcctggccttgaatttaaagaaggtcttaaaaatgtctcagggtaagctcccctaatcaactcttaactgcattggagacacccagatcagaatttgcattattaaaaacttctcaagacagaggagacagattcctgacgttgacacccatgtggcattttcatgttcctagtcgtcatgtgtgtagacgattagtctacagaaagtaaatcaggtgggattcatgccaggtgagaaattcagtgtggaccctgatagtcacttcattcagtttcattggctttagaggtaatgggtggaggtgggggtggagtgtggcagtagggtcatccatgaacaatgtgagctttactcaaaaacattactgaactggatccatctacatagcttcaagctcttgcttcaatgctcactaaaggcctttctcaccaccatgagatgagtcagaagtagctaaatctttcttaaactgtcacctccaggtgcatccagatttggaggcaggtctgcctcaggttttgtggggcctgaagcttataaattttgaggcctttttaaagaaaaataatacaaaatatcttacttatgcaaactttatatgctcatcagaacacactggtagggctcctctcaggatcttggacagggccacgtgaaagggatcctaaagcttaagtttattaacttcacagagaatccacttctgcttggaaagcttctctgcccagtgccaaaaaggcattaagaagttgagggtaaagaaaatggacaaccatttatcatatggtaggtgtcactgaccaagacagaaattttaggttcttatttgatctttgaacccctgaggtgtgctgccttactgaatcaaacctgagccaagcccagctttctcttaagggcagggccctcatctttgtcttgttcgcacaaatacctacccaagaaagtgcatcaataaatgtctgctgaatgaatgactatctggatgactgtgaatgaggaaatatagaaataaattcacactccttttttagactgagtgtcattgtttaccttctccaaagaactctttgcaaaatgttttgagctatgtgaagaaaggcttcatctaaacttattcatgaagcaggccaactagattgtgtcagagggctactaaagtcattctcttattggatgaaaaaatactctagtcataattaagaaacattaaactatatttataatcaaatattctttaaggggattggctttttcttctgggttgagtgggttttgctctcacgcacccagaaaaggccagacagtgtgttgtttgatctattttgttaaccttctcctctggcttatgttaccttaagttgacctttcaagtgctttgtcttctggcaaatatatttaaaactttaggacctaagtaatgtatagctatcagaattcatgcagaaaatcaaagctgagtctggagcattctcttttgaagagaaataccaccctgcgtgtgatgacctcacctgattcatcacctgatacctgatgggggtcaatgggtgcagagaagatcctgagcctagggctgggagcgggtgttgtccacatattggctttgctgtgaactggatgggggtcaggtttgcatgagggacatgttagacatgctggggttggcctggattagaaaggacatgattttgatttaacttttgttctcatgactttgaaggtaaatctgaggttgtgtcatgtagatgagaagtttctaagttcaaagtcgagaggcctgggttcaactcagggttaagagattgtgagcaagatacacaaactccccatgtctcattgttattattttttaatctgtaaaaagagaccaataatgggatgctgggaacatggtagagtaggaagtaccagaaatttgtttccctacctagacaactattacactggcagaatttgtatgatgtaactattttggaattctggagtatattgaaggattgcaacttctaggagaaggcttgggaagtaattgtggtttattttggtcaattatagttcttagcatagtagcaagtcttccaaccttcacccttcagccctgtggcaggcagctgtgccaagtgttcctggagcagcttgcaaactgtttgcaggagccggggtgagcaaaaaggactctgttctccaaatatcaaaaatctgtgttctgatcactgatgctggttctgatcaaagagatgcagacaaaatcgccaccattgttgttgcacctccccttactgggaagctcctccccttggctgaagtgattgtcaggagatttaaagggccaggacccttttaatttttttcaccttcgattttctttttctccaccttcgattttctttttctccttttgggggcctgacattaaatattaggtcattaaaaaataactacatacacagagaaattaggaggtgactttgcaagcccaaggaaaggcatggacttagaaaagacctgaggagaccttatgtttctatctcaggctgattcccagaacagagacagtctacaacaacaaaattaacaagaataaacaaacaaacaaacaaaaacccaaatccagaaaaccctgggaaaggggaaatttgctttccagagttaccataatattagactcaaatgtcaagtttttaacaaaaaatcacaaggtatacagagaaacaggatagtatggccattcaaagtaaaaaaaataacagaaactatccctgaaaaagacgtgatggcagatatactagacaaagacttttaagcggacttcaaaacaactgtcttaaagatgcttgaagaactaaaaagaatatgttgagaaagttaaaaaaaaagatatatgaacaaaaaggaaataccaataaagagagagacatgaatataaacacccaagaagcttcatgaactccaagtagatgaactcaaagagatgcggactgaaacactttcaaagtttttaaagaatgttgaaagtaccaagagagaagggactcacacatataagggatccttaacaagattatcagcagatttctcatcagaaactttggaggtcagaaggcagtaagctgatatagtcaaaacgctaaaagaaaaaaataaaaaacaaaaacaaaaacaaaaaccacttgtcaaccaagatttctatatgtggcaaaactgtccttcaaaagtgagggagaaattaaggcattcccaagtaaacaaaagttggggaggtttcattatcattgaacctatcctttaagaaatccctcaagagagtcctgcagggtgaaatgaaataatactaagtagtaacttgagccatatgaagaaacagagaactcagtaaaggtaaatccatggacaattaaaaagctagtattattgcatggtttgtaacttcactttttcttttctatgtgatttaagagatgaatacattaaaaaaattatcagtataagcactaatattataactttggtttataactccacagtttattttctacataatttaagagactaatgcatattaaagaattattagtttgtatttttgggaacacaatgtataaagatataattctgtaacatcaacagccaaaaggggtggggacagagttgtaaaggaggcagagttattgtatgtttttcatgttaagctggggtaaatttaaattagaatgttacagctttaggatcttaagtgtaatctccatggtaaccacaaagaaaatagctatagaatatatacaaaagaaaggaataaaggaatttaaacatttcactgcaaagaatcaactaaacacaaaaggcagtagtgcagtaaatgagggacaagaatgctgtaaggtatatagaaaatatatttcaaaatgacagaacctctttcttaccagtaattactttaaatgtaaatgtattaaacactctaatcaaaagacaagtttggcagaatggatgaaaacatatgatccagctatatgctgtctaaggagactgattttaggtccaatgacacaaacagatgagagtaaaaggctagaaaaagatattccatgaaaatactgaccaaaaaacagaagggagtagctatactaatatcagacaaaatagattttaagttaaaaacatttacagaagacaaagattaataaaagttccagtactgcaagaagatataacaattataaacaattataaacatttacatacctaatgacagaccaccataacatatgaaggaaaaactgacaaaatttaatggagaaatagacaattctacaataatagttggagacttaaatataccactctcaataatgaacataatagccagatagaatgtaagtaagggaatagaaaacagtatgataatccaactagatctaacagacatatacagaacaatctacccaacgacaacaacatacacagtcttctcaagtgcacatgagacattttccaggatagatcatacattagggaacacattaagacttcctaaaagatttaaaaagataggacaacagtggaagttagaaatcaataacagatgtaaaactggaaaattcatgcatatatggaaattaaataacatacttttaaataatcaatggatcaagaataaaatcagaagaaaaattagaaaatactaagaggtgaatgataagaaaacacaacatacccaaacttataagacatagtgaaaacagtgctaagacttactttaaacacttacattaaaaaacaagaacaatctcaaatcaagaacccaacaacctaacttcacaacttaaataaacaagaaaaagaaaaacaaattaaacccagagctagaagaaaggaaagaataaagattagagataaatagaatagagaatagaaaaataatagaaaaaataaatgaaacaaaaaatgtttctttggaaagagcaataaaattgacaaacctttaactagatggactaagaaaaaagagagaagattcaagttactaaaattagaaataatagtggtgactttactaccaattctagagaaataacaagaattagagaataacaagaataagagagcactatgaacaattttatgctaacaaattgaataatctatatgaaatggataccttcctagaaatacaaagcttaccaagattaaagcatgaagaaatgaaaaatctgaattagacctacaactaataagaagattcaatcagtaatcaaaaatctcctcacaaagaaaagctccggacttcatggtttcacaggtgatttctgccaaacatttaaagagaaactaataccaacccttcacaaacttttccaaaaacctgaagaggaggaagcaattcttatctcattccataaagccagcattactctgatatcaaagtcagagcaagacacaataagaaaaccacagactgctattccttatgaacataaatgcaaaattctcaacaaaaaactagcaaattgaattcagtagcatattaaaagaactatacaccatgaccaagtgagatttgttcccggaatgcaatgttgtgtacaacacgcaaaaatcaatgagtgtaatacacgacattaacagcatgaaggagaaaagtacatgatcacctcaattgatgcagaaacatcatttgataaaatttaacatttcatgataaaaaaaacaaccaactaggaatagaaggaaactatcttaacataataaaagctgtatataaaataaaagcaaatatcatactcaatggtgaaagactaaagtcttttattctaaggtcaggaataagacaaaaatgcccactttgaccacttctatttaacattatactagaaattctagccagagcaattaatcatgagaaagaaataaaggtattcaaactgaaaaagaagtaaaattatctctgtttacaggtaatataattttatatgtagaatttcctaaagatttcacaaaaaacctgttaaacctaataaatgaattaagcaaagtagcaagacataaagtcaacatgcaaaaatcaattgcatttttatacactcacagtgaacaatctaaaattaaaattatgaaaataattccattcacaatagcatcaaaaatattaaaatacttaggaattaacttaaccaaggaggtgaaagacttatacagtgaaaactacaaaacattactgaaataaattaaagaagaaataaataaagggaaacatcctatgcttatggattaggagacttaatattgttaagatgttaatacaacccaaagtaatctgcaaattcaatgcagtccctatcaaaatcccaatgacattttaaaagaaatagtaaaacctatcctcaaattaatacagatatttaagaggccccaaataaccaaaacaatcttgaaaaagtacaaagcagaaagacccatatttccaaatttcaaaacttacaataaagctacagtaatcaaagcaatgtcatatataaaaattaactcaaatggataaaaaaatgtaaggcctaaaactataaaactcttagaaaaagaataggacaaaaatgtcacaacattggatttggcaataatttcttagctaggactctaaaagcacaggcaacaaaagaaaaaatagacaaattaaatttcttgaaaaatttaaaaaatattgtgcatcaaaatacagtgtaaacagagtaaaaaaggcagctcatggaatggaagaagatatttgcaaatgatatgtctgataaaggatcagtattcaggaaatagaaaactcctataactctatgacaaaagatcccatttaaaaaatggcttaagacttgaatagaagtttctccaaagaaaatacacaaatggctagtaagctcatgaaaaaatgcttagcatcactattaatgaaggaaatgcaaatcaaaagggcaatgagctattacttcatacccattgggatgactaccataagaaaaagaaacagaaaataatttttggccagaatgtggagaaataagaacatttgggcactgttggtagaaatataaaatggtaaagttacattaaaacacagtatggcagcttctcaaaacattcaaaatagaattactatatgacccagcaattctacttctgggtatatattgaaaggaattcacagacaggttttgaagaggtgtctgtgtacccatgtttacagcagcattgttcacaatagctaacatgtgaaaggaacccaagtgtccactgatagatgaatagataagtaaaatgtgatctatacatgcaatgaatattattcagcctttttaacaggaaggaaattttataatatgctataacatggatgaaccttgaggatgtcatgctaagtgaaataaaccaatcacaaaaagacaaatactatatgattccacttatatgaggctcctaaagtggtcaaaatcaaagagacagaaagaatggtggctgccaggaattgggaggagggggaatgaactgttcaatgggtatagagtttcagttttacaagacgaaaagaattatggaagtggacagtggtgatggttgcacatttcgaatgtatttaataacactgaactgtattcttaaaatggttatgatgggaaattttatgttattgtattttacaacaataaaaaaatgaaaaaaaagagagaacaataatggctatcccatcttgctgtggctatgagtctcaaaacagtgccaatgaaagggctcaggaaggtgtaaagtgacttttgagcgtggtatcaatgattcctttacataaatatgtaacattaccatctcttcatttgaaagctaagaagacagctttttagtgaaaaatccaatgttctttccaccatgtaaaagagtactatcaatattaacttttattaaaaatgacgttagaaatataaagaagaaactcaatctctttgatgttcagattcatttcaatgtgaaaagtgtacgaaacaaaaatccagtcaaatacataaaataagtgcacctcggcccaagatgattgtgcccttgagttcaagctgataagctgtaactaacggtgccaatgccagcagatgatatggatgctcagtatggaaaacactgggtcgcattctctggacatcagagtcatatgtaggtaggtgtcctgaaaatttggtatgctgtctttttaatgataggaactggctgattggcattctcatgaattaaactaataatttcaaccccattaatatgatagggttattgtttttcttccagagggtaaggatgctttagaatagggccagatagtaatattttattttttatgaactatatgattatatatagttcacaactctgccactgtagtgcaaaaacagccgtagacagtaagtaaacaaatgggttgggatgagttccaacttaataatattaataaaatagccatggatcagttttgattcaagagccatagtttgctgactcctggctttagaatatcatagaaataaattctggacctcctcacatcccctggctgtacacatcatattattggcctctaccaggttttaacgcagctccaatactaccgttaaacaaacttagaaggtgcgaaagcctggagaaaccatcaagacaggtggccatttgggcagacacttcacaacctaacatgattatctaaggccttatatttttctcaaagcattgtttgtcaaataaagcaatgtttaaaatgtaatattgaagctttgaaaataagctgctattctccagagtaaagttactgatgttttgatgggaaagaaggaaaagtgctttccaattcccagaaacgttttgaaaaaatgcaacccaatgctggcttcccatttatgagtgctcaagtttaccttttgctttctcataataaaagtcaactcattgccaaagtttattactgttctaagtcaaaaatcacctaccacttggccgggtgtggtggctcaagcctgtaatcccagcactttgggaggccggggcgggtggatcacaaggtcaggagatcgagaccatcctggctaacacggtgaaaccccgtctctactaaaaatacaaaaaattagccgggcgtggtggcaggcgcctgtagtcccagctactcaggaggctgaggcagaagaatgacatgaacctggggggcagagcttgcagtgagccgagatcacaccactgcactccagcctgggcgacagagcgagactccgtctcaaaaaaaaaaaaaaaaaaaaatcacctaccactccaacttctcaccttccttatgactctctctctcttaccctaacatgtctggaaatgtaaggaagtactgtcagaggccttcagtagggcaaatttaattttgtatctccatttgtctgtatttgaatcaatgactcactctcagcttgggagctgccccttttaccgtatggaccaggctaggatggcactgaaggcaaaacaagccttttactgctttcagaaatgtggattttgagacacttggttgggtttaggtggaatctcacagacctgggttcaagaatacatttgttcttgaccaagtttcataacctttttgagatcctgaacctcagtttcttcatctacaaaatgtgttaatacttgcttcacaggattaattaaaaaatagtgagtggcaaatagcaagtgctaataaatgttcatttctctcactttttctatatgcccctatgtaccctaaattgtatttgttcatgctgatagcaggttttattgtaaactctcatgtatcccccaataactgcctctgagtacattgtaagtgtacagctacataggaatcacgtaaggatctctgcaaaaggtctttgaacagggaaagactgaaggtaggaaaattaattgactaaagataaaccataatctccagagctttcaaggtcagaaaattcatttggtttattttcttttggaaaggagccttgaggtatggtttaagcaattagaacacaaatgtcttgagaacagagaccttgtcagtttcatcaatcagtgcccagaactcatctcaggcacctggtgagtgctcaattaatattcgttttctcaactaacaactgagcatacttaggtctgatttgcttttgtattaactgtgaggagtttctggagctttgcataaggaaggagcagggattttatggagaaggaacactggataaggggcattggataagagtggcaccatttacacactatttaccctgagcatgcaatttatgaaattataattcaaattccccagtatgaaaaattgatctgaaatgggtcagaggaaagtccaatgtccactctaggccagtttctgaccagatatgataccttgaagccataccaataagattccctctaacttcatttcccacttggaaagagaaatcctgctgttgctcagcacttacggagaatcagcatagtgttaggtacaatgggataaagagaagttgtttccccaaaagggttctaaattttctcatggtttttcatgttctgtaaaattgtgagaaaaccagcagcactttacatataacatagttcacatacctgaaaacatcatcatgtgctgaaagttccaggggatcttctgttttcggcctagattcaggaggaaggagaggggatatatgttgcaggctctggcaacaaaaattgctagctgtagataagcacagggaaacattgaggaaagtgttgctgcaatgatggtttgaatccttgagcttaaatattatgtcctcaagcttctcttcattatgaccccaaaaccagaaataaacatgtcaattcacatttgtccaacttgcttccaaaatttatatttcaaagtcaagttcttcccagaaataatagagaactctgcctttctttgatacttgctttaaaattgttagcccaataccaattcaatcactgtaaattttctaatcacatttatattgctgatgactgactatcctcaattctgctgtaaaatgtgaggcagagaccattcagatgctgtggcattatcttcccaagtggtactttagaaaggataaatgtgcttctgttcatgtttaccatcttccttcttatcagtttatatttcctatatctagcaagctttgcatacctttttctttggtgaattaattttgagaggaattacctgtctaattacataatacaactgttgctttatctggcaatttcctaaaataaaagtttataagtaaaagtctttgaaaatattggcgctcttcatctttccctttttgttgtctttgactccttccccgatgggctattctagtttgtcctcaatgggacggagttatttggcaagagttaacttccttttaaaatccaggttttggatgaaattttagggttcagctgaatgctcaatgaaaagagactaagaagcaaatgcagatgtttaattggaacacagtttatagagagggattgcctctgctggctgttcggattatctgtgatccaaggtggcatctgcccatcttccaagtgggaagaaggacaacagttgctgactgcctttggggacattcctaatggctcaacatcctttcagatagatatccattcccactggaaacacctcctgtcccaggcctagagctaggaaaaccccctgcattaaaagtggggtctagatttcatctgtcttcataggaaaggaagggtgctatcttattcagatgaacctgtatttgaacaatgcttatgatgttgaaagcacatgcatcatgctaatttcatttgatcatctatcctatttttgaagtccttattggaaaagagattttatcatcttgcaatgaaaacatttccaaagctgaataatcctggatgcttcctgatatactctaatgcagattaagtctgtttctctataaagaatacacagacataatttttatgtaaatgattcataattatagttaaacatattttgaatgcttgaaaaatagattttcctttaatttccctctttatttccacagttctttccaaagttcttatcttgaaccataattatttaatggaggtcctaatttcttaggatgttttcctcccctaactagaaatcacgtatctgccttgtgtctgagccttgcagtggactttaggaaagtgctttaatgatttaacagaataattcgtaaaagtaagtcattcgttatcttctctaatcaccccatgttctgtatttcaaaggatacaaaggctccaagtataaaaagagcattaaagatatgattctggaacgtgaacagtgccaggcccatgtaacagaagatgacgttctccgccaaaaagttcataaattcaaacaactgaaacaaaacataaaacaaaaaaccattaattataactcaggtttgagtgcacttactttctggtaactgtatttgacaactgactgggtctcctttatctggaaggccacccctttggccgtgtgcttagcctctgaaggaggatggaggccctggctcttgacccagggacagatgccacagccacatcagcatcccattctttccaactgtaaggctgccagagacacgcctgggtaatattaaccagcatgatccttccatggaacaattcctactaagatgacaaaatagtccctgtaaaagaaactgaagctaagtgatttgctgaaggtgtactgtagtaaatgacacaaagattgtttaacctctgtgcacattacccagtagatccacttgacttcccaggtactgaacaactgttttttttaagcttaaactaaattacccttctcaggcaggcaggagggacaaagttggaaaacttggaaacctgaaataaggatgaatgtcaattacattttaacattagagtgatcggtatatttcaaatcccagacgatgagactcattaaattgactgatgtaggtatatccattaaatgtctacaatttctagctgctaaaaagaaaatgattaatcccagggatcggtttatgcagcaagaacacaatagatacatcaaattcagtcagaagaatagagtaataacatgctatgatgagggatgttcccaagagttattcttagaccattaactaaacaatttaagttgaacatgaaaaacgttctccaactttcagattaaaagtaaaagggaaatgttccaggggctacaacaaaggcagatttggaagactttattttatgttccagacttctcatttggaagtttctgagactccattcctggacctacataaatcaccatgttaggtaaatatctctggaggcatttctcttgactttttaaggactcattattttttcatgtaatgtatttacagccccacaaataatgcccaatactgttcactgacagttgacagaaagaaaagtagaatcttgtcagaaacattatttaaaaccagtaatagaaagaaaggattaaaaaagaaacagccctttggtacaagatagttttctctgcaggggcagccatcatcaattatcctgaatgcttgctttacatcccaggctggctcatggaaacaaacactgtcaccaaaataaccagagaaaatttgaaaacaacaggaaaaatgtaggggacagggaatatttttctgcctcattatatctttactttttcaaaaagtgagatttggctgttgtcttaatctcctcaggctggtgaaatgaaataccatatactgaatggcttaaacaacagaaatttatttctcatagttctggaggctgggaaatccaaaatcaaggtgccagctgatttggtgctgatgagagtcctcttcctggtttgccaaaggccatctactcgctatgtcctcacaccgaggagagagagatcatcacttttgtgtttcttcttataagggcactaatccaatttctaagggttctattatcatgatctaactccctcacaagggcctcacctccaaatatcatcacaatggggattagagcttcaacatatgaatttttagagagcaaaaacattctgtccttagtagctatttagttttttaacatcaataaacaaatgtcaaggttaaatttgtagtgcctctctttcttttgtccccatcccaactgtattttaccctagagtgaacattttgccacctggactctattcagcctctctttaatggccttactccaatttccctctgagggcccacttcattccctactctcagcccatgtgttcatgcctccctagctcaaatatggagcatataatttaggactaaaccactcaaatcggtgcatttctttaggcagcatgtttggctcagaaatgagtgtgacatgtttgggcccaagaaaattccatttgaattcaacaagtttaatgcagggaatgctgagacaaaggcccccaccttttcacaggatgagaaatcagaaagatgctggccaggaagctgctggcagccattttgggataacagaggaaatggccgcctgaaagagaagccagttcctgataacagtatttaatcttctgtattcaatctctcccaaaacaaaatttacccttggatttttgcattgaagagatcacgaaatcactttttgatttgaagtagggttctatcattactctaaaacagtcctatttcagttaaatgaacaaaacaaaacactttttcactctaaacagattataaacaaaagggtgtggggtcaaatttttgtctcttttcagataataagaaagtctgttacctttgtccccctcacctccaccatccaattttaatctattcatcatcttaatgaaagaggagaagtatatgggaaaagtcgttttgttttgattttttctatttgttattgagatgtgatgggaatctttgcgctacattttacatggaggcccataattttaagtatttgttttagtgatttgcttcctttgaataacctaggattttaacttgatttactcactcaacttattgaaatctaacacttcccagcattacaagtaactgtgtacatacacatagtacaaaagttttgttttgcattaaggtccgtttttgaacctgctctttgttcgtgttgttatctattctgctgtcaatactacactcttttaaattaatgtggatccataatacattataatatttcatagtctagactgttctcacaccctacattattcagaattttccaggttatttttgcatgtttaaagaaatgttgcagcctggccaacatggtgaaacccagtctctactaaaaatacaaaaattagccagggatggtggtgtgtgcctgtggttccagctacttgtgaggctgagtcaggagaataacttgaacccaggaggtggacgctgcagtgagccgagatcacaccactgcactccagcctgggcaacagagtgagactctgtctcaaaaaaataaataaataagaaagaatgaaagaaagagagaaggaaagaaaaaaaagaaagaaatgtttttcttgagtttaatcacccaggaaagtgcatatatcatatgtttataatttaagatttaaaaaaaaaattaacagcatcccagaatcactcttctctctcacaatatctctttccatgatttaactactattagcacctctaccaccacaaattagcttttcttgtttttcagttttatatgaatggaattggacaatacataccctcgcatttgtcatctttgactcagcaatatgtttgtgagattcttcatattgtatttagttcatttaaaaaattatattaatgtattacaaggtacttattcatactactattaatagacacttgggtattttctagtttggggctatgataaattttgctgctaaaaatacatgtttgcctttctgtagaattgttgggacatagtgccatgcagtttcccaaagcggtggtatcaatttgcactccaatcagcaattctagtagctttacatcttgccaacacattttactgatgttttctgaaatgacacttttgcctcttgatattgccacttgaacttaggaatcaacttttcaatttccacaaaacttacctattggcattttagttggaatagtattaatttatagataaattcggataaaatgcacttctttttaatattcaagtttggatccatgaatatcatatatccttataattattttggctttcttaaatttttatataaagatttttcacatctttgtttagatttattcctagatatttgatgtttcttgttattattgtaaatagtacctttttcaaagttccttttctaatgttcattgctagattcacatatacaattgatttttaaaattgacctagtattcagggccttagtaaatttagttaataattctcacagtttattggtagtttctttttgatttccacagtcatgttgctttcaaataaggataggtttttttcctttccagtcatcatacatttttcatgtttttgtttgtttcattacacttgttaggacctccagcacagtgcaaaatacaagtgagatatgggcatctttgtttttttcccaatctcaaaatgaacatttttcactatttctctatcaaatttatagaaattctgaacagattaaagaagttcccttttgtccttaagtgttggtttttataaaatgtttttcctttacctattaagatgatcatatggtatttgttttttcacttttaaaatgttgttaattacattaattgattttcgaatgctaaaacagtcttgcattcctgcaataaaccttacttggtcattatatattaaccttttttatataccactggatttaatttgctaagattgtgtttaggatttttgtgtccatatattttatacagttttaccaggttgtattgttaaagttactcaggtatcacaaaacagattcctgttctcttccttaaatgcttaggaaaattctaggcttggattttttttttgtaggaagatttttaattacagatacaaatatttaataaatatgggcttagtcaaatattctatttacttttggatcagttttagaaagttatgtttttcaaagaatttgtcattccacctacatttttgtattttttggcatacagttgttcttaatatcctcaatatttgtgtctgtatttatatctttccccatgttattaggaaattgtgttacttttcttattcttgatgaatcttgtaaggtaagttattaactttatgagtgttttcaagaagcaactttggcttgtcgatttttctgtatggcaccctcccttcccattttattaatttctctctttattatttcctgccttcaacatagcttagtttaacctgtttttatttagtatcttgatccttcaggtcctggatgtcatggctgctcatgtcagacacctgcttttctgtgtatgacacagcttttctagttgctttctcaaagagagctgtcctgacgtctgcagtctttcctagctagctcttcttgtatgtatatttttccaggtgaaaaccaatttttgtcagtacctcctacctcccaacaattttatagtattttattttatggtatttataatgttatagtatatataagataccataaatatcataaatttataaaataccataaataccacaattttatggtatttataaaatatcataaatgcaataaaatttgcattttattgtaccacaataaaaatgtatacaatttagaacaaaataagagttttataatatttgggaaaaaagatagattgtttggaaagatttacagtgaaagttgactacttggggtaaaaataaccagaaaccaaagatggattctagctcactccttatactcaaattacagaaaaataatcaatttaaaggagaaaacaaaacctacttatgaattattcaataagtcatcagtaattttgtacataatttttcaatcgggaaattttataagaattgtttgtattagtaaaaacctggaaacaaatatccataatataagaaatagttaaataaattatagtataatacattcatgtaacagcctatattttagggagttctatatgaactagtataaaaagatatctaagatctattgttaaataataaacaattaaagaaataaaggataaatctagctgagtattaacatgtacatatccatgtaactttcactcactttatggacatttgcataattttaattataatgaggataattttaattatgcagatgcccatagagtgaaagttatataaaatttcttagataaaattcctgacatgagttgtcctctcacgaaggggatacgttttctttttaagcatagtaaaaatctgcccttcagaaagaatgaagcaatttgcatctctacaaatggtgcagagggtgcccttttccccatattcttgccaaagtagtttttatcagtttttaaaaacctttgacaatatgatagaatcacttattttcaattgtagatggttgttggcattttaaaaaaggcttctttcacagcaatgcaacagtactgattagcactccttttgtctatttatatcacgtaacaacatttctttgaatgaacagtcttcataataatttccttcttggggcatttaatgagaatctgtgggcaaattcaattttgtttcatatgccaaaatctcctgaaggcatgtttcaaagggagaatctatacagcaaggccagctgacagaaccaatttgaccgttaggacttcattgcctgagtctggcccgaaggagtacgcaatcactgagggaataaacttattggtcaattttggataaaattttaaaaaatgaaaaaaatcttccaccccaaagccaataataataatcacaataacaacacatttcaaactagtcaattcagtgttcaatataaataacttcaaatctacttcctccccactcagggtcagtaaaaaataacttgactcaactttttatttatccggtacagtaaacatttattttgtttccattacttcacagtttgtgagcatttggagaggacccaagttaaaagtaatctttgcttagcagggcttttgttcaaggggcaggggggaagcaagttaatagtgcaaacaagactggggaagtatttaaactgcgtaagaggacaatctgtgtttaaaaactctgaacgctcatggtaaccattcatatgttaattaagtgacttaatctagttagcaaaccatgttctctgaagacttattggatactatgctttttattgagttactgtatttactagaaagtaaaaaaaaagtcatatctattttataaaatatgtttatcactaattctgattgacctttttcttctatccacacaaaaaaatgtaattttaccatattattatggttcatagggaaatattacagccgttcaatatacctggctaatactaattaaattcacatgaattcctcaacatagcttttatgaggctcgacacagcttttatgaggctcgacacaacctgctgactttcatctacttgtctatgaaaggcactgaaattcgttgaaaccgagatgttaaataatctcaaaactgcaatgaaaattaaatgaaatggttattttctttagaattttatctcagaattaatcttggcttatattttcattttacttgtaaaatttgtctttattcctaactgggagctttctacacagaatatctcagatttcatttttatatactattaagtatatccatagctattttgaacaaagctggcatataggtgaataatttttattcctgcattggggaatttgcaaataagcattacaataaatgctattgaaatgataaacttttgctcctacgatttaatttaattaatattttgggctgagtacggggactctattgatggtgcaggacaaagtggggctttctaggcccctcccattcttcagagggtgtggcatggaaactgtgtctagaaggggagattctcagtgtggttggggggtactaagtggggcagggactgcacagcagctgagggcctctcttttactctcatgctgtcactggggctggtggtctaggaggccatgtggaccataaggcctcccaccctgttgctgtagccaaattcatggtcatatcaggaaatgagcttaacaaagtggtcattgagagcaatgccagtcccagcatcaaaagtggaagaatgagtgtcactgttaaagtcagaggagacaacctggtgctcacgatgcccaggatgcccttgaggggaccctccaaagcctgcttcgccaccttcatgatgtcatcatatttggcacaagtctctccagatggcaggtcaggtctgtgactgatgttggcagtgggaacatggaaggatatgccaatgagcttcctggttcagctcagggatgaccttgcccatgccttggcagtgccaggagatgcagggatgatgttctggagagtcctgcagccatcacaccatggtctcccggagcggccacccatggtcttctaggtggcattgatggcatggatgtggccatgagtccttctataatgctaaagttgtcatggatggccttggctgggaggctaagcagttggtgacacaggaagctttgctgatgactgtgaagttgtttttgcacttctcatgatttacatccatcatgaacatgggggcatcagaggagggggcagagatgatgactctttggcttccttatctaagtgagcctcagccttctccatggtagttaatacactggtgaactccacaacataatcagtgccagcatcgccccatttgactggggtaggatctcactcctggaagatggttatgggatttccactgatgacaagcttcccgttctcagccttgatggtactgtggaacttgccatgggtggaatcatactgaaacatgtaggccatgcagttgaggacagtgaggggggttgttgatggcagcaatatccactttgctagatttaaaagcagcactagtgaccaggtgcccaatacagccaaattcatttactccggccttcaccttcaccatggtgtctcagggatgtggctggggttgcacgagaagatgtggctgtctattgaatgggaggagaagagagctgctcctcggattttaattttcactcagttccaagtacttaggaaatgtgtttgaggggaacccaataattctcatgggctgtagaggtggcacaggagatgaattataataatgacctttaccaccagaacataaggattctgaaggcttttttgcctattaaggccacggttccccagtgacgcttcctctataaagttgaagatttacagttacatataggtaaagtgcaatctttggagatccttctatatctaaagcattatagtaatatcaatattactacttctaaaatagtaacaatgttaatgaaattcctatttttttaggacctaaattgtactaagaaatgtattaaaagcttttacatactttaacaatttttaaaaacctttatgttataaagtcaacaaaactcaggaattggtaataatattcccattttaccattgggaaaactacattcaaaggcattaatacacttgcattaacacaataaagggaagaggtcagttgtcctgagttttgtccaaggctcacaccatttgtgccagactaggcagcctccccattgtatacgattcaggctctggagtggcaagatgtttgaatatttgtaacactttcaagtttgcaaagcatattttcatacacacatcttgtttgatcatcggaacaagtcaggggttggcagggaagatatcagtgactctgaccatatttttcccaggttaaaaaaaaaacttaaaaggtaaatttctttgtacccaattagtggaagcaacagtgtgtggcttgaggcgggggatacttatcctctcccaaatatctatcaccactcacccatccaagccaacccctcctacactcattctctctccctgcccccaaaaagcaaaaccaaagctcttgccatgtatttgaagttttaagacaaatccttttccaaataaccctcttttcaacccaatttcttcttcagacaaattctgttttgccctgtgccctacagtaacatgataatgattatatatagctttatatatgcatataaattatacatatagattatgtatatgcctagagtaagacaaatgtcatccagtttggcaggctgggccccaaatccaacatcagattctccaagttgtttaggactatccagtccctgtagtagaggaggtgcaccacttaagcgttcagagagctgctctttatcatatatttctttgtttgagaattttggggttccctatgcactcctgcttgctacccagccctctcctgtctcgtatatttcattgtcttcttttaaacttaatcttgctttttaaaaacatgagaatttcaaaagcacagcctataaaaacacaacaaaacacattttaggaagatgaataggcatcattaagtaagtaaagttaatataggacataaatgtagttacagctacaaggaattgagcttcattaaactgaataaatactgaataaatactgtagctagatttcctgaaaccctcaagcttataacttaaggggaaggccattttctctgaatttgcttaattactttagccagtaaatactgataatagtattcatatttctggaagttttccactttggagtcttccctttaaaaaaaaattttgctattaaagtaaaagtcattgcaggattttgtaaggttgcatttaagttaatatacataaagttaagaatagcttctcatgttggcaccttgacagagtacttatcatgatactgctcagagatattggtcatgaaatagattgaccttagatccattttgatgaatttaaacacaggtacacatatgcacacagaatttaaaccataagacttcaagagtagaattactttgtaatgtatatagtccaaacatccatccaatgcctgattgctcctatatgcttgttgaggggctgctcaacctggaactgaacattgccaaaggcagaaaccacactacttcctaaggaagtgaatggcatttttggacctatataactgttagaaatccttccttatgttcagctaaaatttggctattactttcaaccacttctcctatttctttggttcacagaaaaatgagtcacatagggtatcattttattttatattgcttggctctaacagcagagaggggatttttatcagaatagttgcagcagtaggcaattccacagtttaggcagcaactgccacttttcattcaacagtcttattagttttgaaaataaacattttgctgctgtgagtttgtggctgacatatgaggtcttgagtctagaatatctgcaaaggctgggggactcttttggaggacacttatttgaatgtaatgctggttacattcaaacaagtgtcctccaaaagattttctcagtaaatctaatagtactggtcctttgaaaaaacaaaagttgtagaataagacaattagtttctctgtggttttgccaataagtactaactaaagaaaattgcctagttgaaacaatatattttctgtgcagaaattaaaatcgtgtctttaaaaaatcccttaatgaataagccaagaaaaacattgatattaatattaggtactggtatggaaaattcacacattatcacatttttcaaaggttaacagtcccttttctttaactttttttatttagagattgctgacctccttccttattcatcttgtgcatattatcttaagattttgttttttagagcaattttaggttcatagcaaaattgagaggaaggtacagagataccccatatacctcctatcccgacacatgtacagcctctctcattattattatcattattattattattatttttattttttgagatggagtctcactctgtcacccaggctggagtgcagtggcgcgatctctgctcactgcaagctctgcctcctgtgttcacgccattctcctgcctcagcctcccgagtagctgggactacaggtgcccgccacagcgcccggctaattttttgtatttttagcagaaacggggtttcaccatgttagccaggatggtctcaaactcctgacctcgtgatctgcctgcctcggcctcccaaagtgctaggattacaggcgtgagccactgcgcctggcccagcctctctcattattaatatccctcattagagttgtgcatttgttacaattaatgaatctatgttgaagcatcattattagccaaagcccatagtttacataaatgttcactctaggtgttaaacattacttgtgtatctttttgtctttgtaattagcctatgctaaactcttaggtgggagtatgaagaatacatgtcttagttctggcttctataataaatacaccatagactgggtggctgaaacaacaaacacccatttatcacagttctggaggttaggtagtccaacattaaggtggctgcagatctggtgttgagagcccatttcctagtttgcagatggctctttggttgtatcttcatatgctggagagcagagagaatgagcaagcaagctctcacgtctcttctaataatggcatgaatcccactagtgagggctccaccctcatgacctaattatctcccaaaggccccaactccaaataccattaaattgggggttaggtttcaacatgggggatacaaacatgcagtccatagcaacacatgaaaaaaggaaatatttctaattatgtttttttaaggtgtctgaactgaataccaaaatcctagccattgccagtcagatgagtaacaactgtttaagacatgactgaggatactccactccatccactatgagaaccatgtgctctttctaaattaacatttactgctagcaacaaacagaatattaagtcccagatatctagagatgtgtttgatctcttcatgccaacccaatcccttgataaaagtattgcaaactaaaatacgtaggattgagaacattattcagtgatgtttcatgatcggccattacacagtggaatgcattagatcatcaggacaaacacaaaaccctagaatcaaaccagtattcattcaagcaggctttgtcactgccagtgctgcacttgtctgaaataacacttagtttcataaccagcttgaagatttcaagagcttacttgttttatgttatgttattctcaataaacattttcattatgttagtgtatattgagattcctttaaaaaactttctgaattcggtagttttatatattctactgtaatggtacaacagtaatcagaacttctcagaaaaatttcttttaccacatttcccccatctccaatttatgaggaaaaagaaaagaggactaattaaactgatttactatttaacctgaccaaattcattgctcaacttttcctttcacttttgggtcatcttttgggtaagatataaaagtaaatattttacaatttagaaggtgaagaggcacagatgcttttcttgagtatttcagtaagatttttaatgtaataaatggaggacatagcactcaactttatactatatgtaaacagtgatattaaaactcttaatttttgttctacaggtggttataagtttacttgatttaactaacaaagaaaataaaaagctacaacaaacagttaaaactcattgtcattaggcagatgtctttgaattcaatttctgatctatggcagagtggactatggaaaggcatgcaatagaaagcttgaaacttagagtagaacattgattctttgggacatgataagaaattggagagtgtaaaagaggctttataaatcagagaaatcaatgaaaatgaaagacaaaaatatatgacatttggataatgtcattcaattggagaatagactatcagataatttttataaaggcatggctataaataaatcaatagctgatgaaaattatgtttgcttaacttgttcctttgtaatggatagttaaaatatactgactgtagattgtcaatgtttatattaaactccagaaaattcttattttacaacgattaagttttttgagctttcttttgatgagatttataaagctcccctctgtaaagcctctgtgttgaagctactgcacgcccttgagaatataggcaaaatgccaaaaattataaattattacagtgtaagagtgtatttctctttgtatccaaggaagaaagttatatttcatataaagaccatgcatgcataaaacagctctgaatgagagctttagctctgacttatttctgtggtttggggtcaattttgtttttgttccaatctgtttaggtccttcaaagttaccctacaaagatccctgagaaagtgctcttgtatatgtgtatttatgatgattttcaaaaattagtttatctgcaaaaaaattatatacatatatatggagaaagactgtactatagatatgtgctagaagctcttagtctccactctctagattaatcccctatttgttctgtaaaacatactgtctaatgtcctctacacactaaatgctgacgcttagtaagttgctctccagtgtgcccaggtaacttctgcttccaccacatgaattttatgcttaacaagagccatgcttgttccaaaatttgtttttgtctactttaaattgatatttgtaattgcataatttgtatagattaaatgtggatatgaaagaaagttgatgtttttcaaaaaactaagttaaatatgcagaaagacttgataaaattaagttgcttagaaaatattactaaattagtagtgagaaggacaattgtaaaatgttgcaaaaatgtatatccaaatacagacagattcttatatttgccaatgtctttaatctcaaaactaaagcaatagaaatactagaaattctggttgatatatttgtggtgtactttgtgaaagaaaggcaactcagaactgtaatattcaaagaaaaaacattgtctttattaaaagattggaaaattaatatataatttataagtgaaaattaaatacccgagatatttgtgtcattttatagaatgattctttgctttagatgacttttccattaattagctggttccgatcctgtgttggataaaagcacctaggctctgagtgtctattatttctctacttcaatttttgaaaaatattgaaaaattttcaaatttaattttttcatccgattcttattacgtcttcttgtacccgcttcatattactaacattctactttatctctttaaggatactaattatgcccattttaaattcttggtccatatgttccagtaattttgcttcatgtttatgttctatgttcagtttttggtctgttttctactggttgtatgcattgaacatcttgctgttttggcctgtgagtcacattttcctggggtcaaacttgttaggcaaggtgtgtggggaaaggcccatatacacactggaatatcccctcagtaatgttcagaaggaaaagggtaagctccagggtggagaaaagctttaacacaaccaaatttttgaccatcaatgtctgcctgttcacttctccaagaaattcctgtcaggaatttgcctttaaatctttagaatgaagcaacactgaaaagacacgatttcttcagatcctccatcttccattagcccagagaatttgggggtgcagaagatcgagaaaagaatgcccacgggcaattctcgcactttcatcaagttgtttggccccagacaccacaatggatgccttgggctggtgcagtgggggtgggcggatgatcaccccaaaacagtcaagtaaagaggggaaggaagaagttaaaatctttgcctgaacctctcttcctacttctgtttctggctactgtccaagctatggccatcctttcccttgcccccacgacctttaagacaaccttggcctttccaggtgttctcctagttaattattacttcttcagctcccagcttcctctcagttatgcagtccctccagttttaattggggaggaaggagccagcagctgaagctatttgctatctcgtcagcactgatttttgtattcttttttgaagttggaattgctgattgagaatgataaatggtattgaggtgttctctacagggaaatatgctcagtttaatttgagtcaaattacagcccgtgttaggagtactaagccaaggctcagtggcccaagaggcagaccacttgtgcagtattaactcaacaatgttttactccagcaatactggaggaccttgtccaggcataactgggggtatgacgtagtctgtggcctaagccctcagcctctctgtgaagtggcacaccctcctttccttggatgaggaaatcattcatttcagatttcttgggactgacctattttcagacactttggtcttttatctgcatctatacataattgtgtctttccaccatttgttctatatttggtctagaaaataatagtcattctacccaaagacatatcatttcttatatgccttatacttcagatgctgaataccctggaatttcaccttgtggtaaatcaaactgaatactccaaaaaaagggtaaagtcacaaaacaggcaatttctcaaacaacatgtatggatagcccaaaaacttgtctgtaagctcagcaagagcaccaaccatattcgttttgtttgtcactgaacctcaactcacagcagagaacttagcatatcataatgctccataaatatctgctgaatgaataaaattaataaaaggcaactctcaggaattgcttggtggcactgaaagtttgtataatcatccagcacggagattaggaatatgtaataaaactttataggatctaaaacgttgaactgagcaattacacttactagaatttatcctaaggaaataatgtaacaagtagacatagatttacatttaggatgttaactacttaaaatgaaaagggtggaaaaccaccaaaacatatatcaaaaagagaatacttaaactacaggcatactacaggagatattgtgggtttggttccagaccactgcaataaagcaaatatagcaataaaatgagtcacacacaatttttggtttcacagtgtatataaaagttatgcttacatgatactgtagtctattaagtgtacaataccgttatgtctaaaaaacaatgtacatggctgggtgcggtggctcacgcctgtaatcccagcactttgggatgccaaggcgggtggatcacgaggtcaggagttcaagaccagcctgaccaagatggtgaaaccccatctctactaaaaatacaaaaatcagctggtcgtggtggtgggtgcctgtaagtccagctacttggaagactgaggcagagaattgcttgaacccgggaggcagaggttacagtgagccaagactgtgccactgtactccagcctgggtgacagagcgagactctgtctcaaaaaacaaacaaacaaaacaaagcaaacaaaagaaatgtacatgtattcattaaaaatgctttattactaaaaaatgctaacaatcacctgagccttcagtgaatcataatctttttcctagtggagggtcttaacctagatgtttaatggctcctgactgataaggctggtggttgctgaaggctggggtggctttggcaacttctaaaaataaggcaacaatgaagtttgctaaattgaatgactctccttttacaaaagatttttctgtagcatgtgatgctatttgatagaattttacccacaatagaacttctttccaaattagagtcaatcctctcaaactctgcggctgctttatcaaccaagtttatgtgatattctaaatcttttgttgtcatttcaacaatgttcacagcatcttcacaatggattttcttgaaaatccatctcaagaagccactttcgttgctcatccataagaaacaactcatctgttcaagttttatcatgagactgcagcaattcaggctgtttttaattctatttctcttgctattcctaccacattcgaagttacttcccccactgaagtcttgtatccctcaaaatcatccatgagggttggaatcaacttcttccaaagccctgttaatgttgatattttgacctcctttcataaatcacaaatgttcttaatagcatttagaatggtgaatcctatccagaaggttttagatatacttgcccagatccatcagaggaatcactttccatggcagctatagccttgcaaaatgtattccttaaataagaaagtcaaaattactccttgatccatgggctgcagaatggatatttgttagcaggcatgaaaacaacattcacctctttgcacatagctatcagagctcttgggtgaccaggtgcattgtcaatgagcagcaattttttaaatttattttttatttattatactttaagttctagggtatatgtgcacaacgtgcaggtttgttacatatgtatacatgtgccatgttggtgtgctgcacccattaactgatatacctaatgtcatttacgttaggtatatctcctaatgctatccctcccccgtccccctaccccaggacaggcctcggtgtgtgatgttccccttcctgtgtccaagtgatctcattgttcaattcccacctatgagtgagaacatgcggcgtttggttttttgtccttacaatagtttgctaagaatgatggtttccagcttcatccatgtccctacaaaggacatgaactcatccttaaaaagagcagcaatattttgaaaggaacctttttttttttttctgagcagtaaatctcaatggcggtttcttcaaacaaaccatgctgtaaacagatgtgctgtcatccaggctttgttggtccatatatagagcacaggcagagtagatttagcataattcttaagggctctaggattttcagaatagcaaataagcattgtcttcaacttaagtaaacagctacattaatccctaacaagaaggtcagcctgtcttttgaaactttcaaaccaggcattgacttctctccagctatgaaagtcctacatggcatttttgttcaatagaggctgttttatttacactggaaatctgttgtttagtgtagccacctttatcaattagctagatcctctggataacttgctacagcttctacatcagcacttgctgcttcaccttgcacttttatgttatggagacagcttctttcttcaaacgtcatgaacaaaccttgctagcttcaatctttttctctgcagctatcttgcctcttagccttcacagaattgaagggagggtcttgctctgcattaggcttttggcttaagggaatgttgtagctggttttatcctctatccagaccactaaaactttctctatatcagcagtaagactgttttgcttttttttgttatcatttgtgtgttcactggagtagcattttaaatttatttagaaaacttttcctttgcatcaataaattggctgttttgtgcaagagacctagctttcggcctgtcctgccttttgacatgccttcctcactaagcttaatcatttctagcctttgatttcaacccagacatgtgcaactcttcctttcacttaaacactcagaggctattttaaggtgattggttagcctaatttcagtgtttttgtgaatagggaggccagagaggagcaagagagatgggggaatgaccagttggtggagcaatcaaaacacagacaactattaagtttgccatcttatatgaacatggttcataatgcccctaaataattacaatagtgacatcaaacgttgtggatgacagctcatcataacacatataatgaaaaagcttatgatagtgtgagaattagcaaaaggtgacacagagacataaaatgagcacatgctgctggaaagatgaggcagagaggcttgctccaagcagggttgccacaaaatttcaatttgtaaaaattgcagtatctgtaaagcacaataaagagaagcacaataaaatgaagtatgactgtctacaaaaggcattacacttctgaaggctcaccagcatatacgatgttttctacagtttttttcccactagatactgtatcacatagaggaagttcttcccttttataccttgccaaacatttttaaattaatatgtcttgaatgttttctattaaatgcgttttctgtatctactgagagattattttctcttcatttgttaatgtagtaaactgtactcacaattttctaatattattcttatattcctgggataaatgcaggttagtcatatgtatttttttacattgatgaatttggcttgttgattgtttacaacctttatatctctgtttacgagattggcatatatttttcatttgtgttactgacataaactgatcttcatttctggagtattatcctagcctcatgaaatgatttgaggtgcatttctcttttgtcttttctctttcacggtttgtataaaattggagtgatctattccttgaaagttaggtagaactcacctaggaaaaattctgggccttgtgtttttgggtgaatggatttttagctactgactcaatttcttgaaagattgcagggctatttagggtttttttcttccttcagatagtttagtcagttatacacttctaggaaattgtccatttaagttttctgatgtatttgcataaactgtacacgacatgttcttactttttaatctccacagcacctccagtcatgctcttctcttatagcattgcttatttttgctctctctctgacttatcaaaattgtctattttatttgtcttttcagtgaaacacttttgacttggttaatcatctttatttcagttttcttatctatttctttttatttcagcttttatctttattttttgctaaattctgcattgtttggatttgttctgtatgttctttttctaacctctcacactggtatcttaactcgttaaatttaagtctcttgtgccttttaacataaacattaaaggatataaatgccttaatttcaattaaatgctacatttaattagctgcatctggaaaattcgggtatgcagcttttatcgtatttattttataaaattaattacaatcaagcaaatacataaatctgcttttaaaaattagagcattactgatgacagagtctcctttgattacccttctttgcttcctgcctctcctaccctatgtaaaatatttttattgagagaggtatatttattaaagtagtagtgtattttcatgtgttttaaaataggtatcattctgaaaatatgctgagagtaaatttgctggtcataggtttgtacaggattacttttaatagatactacaaaattgtcctttaaatgagtatataatttttcatcttcttgggtagtgtgttagaatatctgctttcctaaaaccttaccaattcctaatctgagcaacttgaaatttttttcagtcctatgaatattatcttataatcattttaatttgtagtcctgattaatagtgagtttgagcatttctgtttattgagtattgaaattcttgtttaataaatagcatgtcaatttctttaacttttttttttttccttcagcaagggctttatttatcagaagggcattacgcttgacctccaaatttggctgacaatttactgatgagattcataacctttgagttgctctggtattttgacatacttgctgttttctgagccacatcctggaaggccaccataacttctggatcctgcatggcggcaagaacctctggatcactaagaatttcattgagtccaggcattccggccattccaggcatgccccctcccattccaggcattcctccaggaaaattaccaggcattctcccaggaaagccacctggaaaagagccatactgtgctcctgactgtcgtctggcttcttcctccctctgggctctctcatgctcctcttgagccttcttaactcgttctgttctttctttgatctctcgctcttcacgttttcgctcatactttctccgatgttctgcaattttctgtgccctaggttgaacttctttcagcattgcactagcatcttcatcataatccaatttacaggcaagggcaagatcatgggctgcttcttcctactggcctagaagtctgtgtgctttcgcccgccacttgtaaggctgagctgaatcaggatttatttcaatggctctgtcacagtcttggatggcagcacttggcttctgtaatttgacgaagacactggccctcttggcatacaaaatggccaagcaaggattcagcttgatggcatctgtgaataagtcaatggctttctggagttcaccatcgtttagggcttcaatagcagccactttttaatcatttgcctgatccatcatctcctccgttatctccgcattttcatctcccatttcttaaggagcatcagtgtctggttcaatcacaccttctttatcaatttctagatcactttcttcacttgacggttcttctgcctttaagtcttcctccaccttcttactgtcaggtttttcttccttggtattttcttctgatttagctttctgagtagcaggtggtactttacctcccatgctctccacccactccctcaggaagcgcatttcctcggtgtgcagaacgctcggatcctccttacacattttcacaaaggcccgaagcttgttcactttgcgggggtccatggcagggaggtggtgggcgaagctcaggggctgcagcccggttccaggcccaggcgctggctcagcgtgaccacgcagaaagggctgtttaactactttctttagatttttgtgtaatattatttgttatctattgagtagatattatggaatgtttataactgtgaaatataaaaacatacaacaaatatctatatgctcctcatacagtcaaagagaaataacatgacctttatatttcagaattgctctttactcctctgggattccatcccatcgtgtccaccgctgcagtaattactgtcctaaattttgtgtccctgattaccttgcttttcactatacttttattgcatatcttagtatcacagaaaaatgtattatttggttttttgtttttcaaatttacgtaagtgaaataatgctgcatatattgctcaaaatttagnnnnnnnnnnnnnnnnnnnnnnnnnnnnnnnnnnnnnnnnnnnnnnnnnnnnnnnnnnnnnnnnnnnnnnnnnnnnnnnnnnnnnnnnnnnnnnnnnnnnnnnnnnnnnnnnnnnnnnnnnnnnnnnnnnnnnnnnnnnnnnnnnnnnnnnnnnnnnnnnnnnnnnnnnnnnnnnnnnnnnnnnnnnnnnnnnnnnnnnnnnnnnnncttatttttcctaatgtttctcttaatttacacccacatattgtattatacaacaagaaagaggaaatgagaaggaactcagtgaagatttgtgtagactgccttcttcctaaaggtttttaagacaaacttcctatacattatgtcttatttgatttagtgctgcttccagcaggaagatgtactctgtgatggctcatggttttagcttcttctctccctcatgtgaatctctgtctccaaagacatgaaaagatgccctaccactgttctgagatgaactcaaataaataaaattcagctctattcaccagggtctctagaggcttataaatgaagatcaggataaaggaaatttggggatgtggtttgctttccttgccaggggagcatttgaaatctcaagagctaagtaaggccaaaatgctcaagcggaggcatgagttgatgtatcagattcactcataaatggggataatgatagcttctatttcatggcaccagaatctataaaagtactcaccaaatagctgttgttgaatgaatagtgttgtaaagattaaattagttttcatgcattagtttttacaaaatgtttgtggctcataatgagcactatatgcatgttaggttttgtttcagttattttgttgtgttttttctgagtgctggaattaggactcataattatatctcgcagttcaagcttcttatctataatgggattattttattctatgaactaaaacataaaatgctaaaaggaggtaagttgacagaggcaaatcctgaatcacattatggcaatttttcaatgaattcagttagagtagccaccaatatgacactggttaaatcagaaactcccatcttgacagaacagtgagaagccagatccaacccttatcagttgtctgattttgtctcctttttcttcatgttgcaaaaactatttgaatagtgtttttggtttttgtttgtttgtttgtttgttttgttttgttttgtttttcagatttctgatggacttgagataatgcatgcacacttttccatttggtcaaggtttttccttactaactgtattagtctgttttcacgctgctgataaagacatacccaacactgggtaatttataataaaggaaaagaggtttaatggactcacagctctgcgtggctagggaggcctcacaatcatggcagaaggcaaaaggcaagtcttacactgtggcaagcaggagagagaatgatagccaagcgaaaggggtttccctttataaaaccatcagttctcgtgagacttattcactaccaggagaacagtatgggggaaacagcccccatgattcaattatctctcaccgggtcccccccacaatatgtgggaatcatgggagcttcaatacaagatgagatttgtgtggggacacagccaaactctctcactaacttagtaattatcacttgaatattttattaggcatgataattcatttgcttatagccacttgttagccacagccctctaaactcaaagccaggtatcccttcccttccctcagtacagtgcatgctacaacgtcaatagcttcaacaagccaaacctaaaactggatggtaggctgctttcccagggttctaataacaggtggtgcacgggttagactccaggcaagcacaaccccagtttcctcattctcattcttccgtcctagagtcataggagtggcttctgttctgctcatctgaaattcagaaacaaaatagggcactcctttgatagactttttatttgctaaatttactggaaatacagcatcagatacagtgtccaatcttcctagtcttccatttttcaattcttctcttttcggtgtacatatcaatgactttataaaatatgaataagtactatatacatttatataaatgtaaaacatttaacaaaatactcggtatctaactctctccctagaagccagtaatcattgatgggttactgagtccttggaattgaaaactatgacttctattctcttccctttgttacagttcttctcaagttttcttgagtaaaaatccctgctctcatgtgttcaattcacctggtatataaaaccatccaacaaaacagtgttgaatccttccaaaatccactggcaaatactttcatgggatgacattccctaaacaaaacttcataatgcccttgttttatccacacccctagagaggattacatatcaaagaattaaaaatgttttaatagaactcaggccaaaatgcttcagatgaattaagaaatcctctgggtctcttccaaaagccaaagtgaacttggactttttctctctccagtgtttttataaaaacgttttaaaagttgaatttgtgttttcttagctatctcagtattgcggttctgatcataagatgttgacttcctcccagaggggcatttcccactctgaaattagctgctgcattttttgcttgagaggcttgactgcgtctctaccctcaagcaccttagctcaccccgctgttgttggcacagggtaactcaccctcctcatctgcagctctgtctcctcccacatggcaccggcactgtccctctcatctgtaagatacacacattctcctttagacttatttccttctgtttagagttaatgctcttgatggcttcacatttccactatttcatattgttggtcctcttaacttataagtcatgaagatcaatcaaagtaaagataataaactcctgacctatcagatagtctgatgcctggcacacagtaagtacttaagacatatttgtcacacttttttttttttacttttgagctagaaggacaaaaatacccaggcatgagttaatgtatagaaggtggcttattctcctttgccttcttctaggactttttacttgatcagaccatatgaaattgctgctatttgatagtttagaccttatagaaaaggtaattttgtgtgattcagctgttttcatggtgctaagcagcttgatgttctgtttgcaaagagttcccaccctcacagagttgttcatagggttatagggtgaccaactactaccgggatagaggactttcagtgctaaaacgggaaaagatcacagcaaacttagatttgttgatcacccacttatcacactgcagtcaaattctgctttctgtactttcttatttcctaaatgtgtaaaggaaaaaatttccaaactcatcataatactaggtaagatttattgagggcctatcatgtacagacaactgagttaattggtttaatctttccaataatgctgaattcttctaataattcttaattccaacaataattcttacctccattttgctggccgctaaaaggaggcacagaaaagcaaagtaacctgactgaggtcacagagcctataatggtggagcaaaaagctgaacacaggaatctgagcccaaaataagtctaaaagagggatatccagttttctctacattgagtaactgtcattcctgcaaagcctgcctatggaagtggttcctggaggaaaagacatggaaatgattttctccatttctctctggctttcagtgttcttccttctcctccaactcctactctccaaagatctactttcagttacagccaattagccttggctgtatcacgatccagcctagcctggtgacaatgcctctcaccttgttccaagtgcacactacccagttcttgacatcaagtgccatgctctgtcctactaatcctgccccttacctctacctggaccactgcttcctgcaaagcagtcttctctgtggtcctcatagccctttggttgtgccccactgctgaggcactgagggaagaagggttaaacattgggagggatgtggacctattgctaagtcttgaagagtcttgagtcttgaatgtggtgctaagcagtttggctttccttcggtagacaggaaggaaccaaccaagatttacaagcaatggcatgagcacatctgtgttttagaaagataaaatataagatggactgaagcagggaatctataggaatatcttcattgtatgagacctgacaaattttgacacaatgccactaagcacatactatgtggcacaaagacaactagtcaagtaagtgaaaaaacaaactcaacctaatgaagttccttcaaccttgtgctactgttatctaatttttactctcctgaaccattagaaaattctaataataaaaaacacaagttgtcaagttttgtcacgtgtcaataaaacactttaaccatattagaggtactgtgcttcaatatgactgatgtgttcagttaaaatgctgaagtttatgaatcttaccgtaaagcttgaagaagaacagtggagatacattacatgctatctgtgaaaaatggtaaaaataaaaagctaaaatgaaaatattgaatctttgagagagaaatgcaggcaccgaaatgtgctatcatctcatcactattctctataggcttgtggattagacaagtcgtatatgtctaaaactgcatagagggtgtttcagaactagagatgtaaaaaacttactttaaaataagaatagagctctccagtaaacctaatcattctcacagggcagatcggctttaaacgaatgtcacacttatctatatatagtccacagttccccaggggtgcccaagccccttaccccacaagaagcttgatatatatttcaacacacagaataacatatactttgccctaagacttccttttatgcttgctaacttcaggatcctcacaatggctgcaaactcctaatatttcaaagactgtctacattaatatctttcaaagcctcaaaccctggcaaggaacaaaaattgtttttgaatcggcttcaagaattaatattagagaataggaggtttttcctctcagcaaattgaagttgaataaattgttctctgtctccttaaaatggaattggttgctcgaggtgagctctgctgtgaggaggcaggatgcagcagcactgtgaaggatgatggcagggacaatttgggggacaggagggggcctttcttctcttaaattaggggcaggtctgtttctttaaacctggcatagatgctaaaatgtaggaagtaagtatattagcttggagttgcattaaaaatagctggaattgctgggctattaccacctcttttcttgtgttaccaaatgcccacagagcagcctgcccctaagcattcctgggcagccattcatgtcctcatggctgtgacacacatgaattgaaacttccatgtgcagagacgcagatggctcccttctttggaaggagaaaacaaaccctccagacttccttttggtgcttctaggcatctgctttgcccactatcttccccaaacaagaagatgtgactgtggtttgagggtttagcttcccctgtggatttaaaagacctagacatcacagccactggccaaaagctttcaatgatggctttgatttagttatatctttctgtttataaaaatgactttactgcatagtatattcatagatgtaaaacagagtaataagactcaaggacaattctgttgcctaaaggcaaccactgtaactgctaatattttgacatttttttccttccagtcttttgtagctatttcatttatcaagaataaactgtatatgtacaattttgtatcctgcactgtctgcttgacagttataactaagaatttccccattaattttaatttctcttttttcttttgtcattattggtcaaataaatgtaactagatatcatttacttttcttctctcacagcctgtggattttgattatttcattctttcctgtttacgcatacatttaaatcagattccacaaaaactcactgacattatctaagtgaaggggcatgtttgaaagggacaacatgttccttggtactcacagactcagaaatatgctgcaaggttgtgatgacatttgaatgctatttccagagtaaatgatgaaatacttccccaggagacacatggagcgaagggcagcttgtgggatgattgggaagatgagactcatatgctacctccactttctagagaaagtatcagtcactaggctgacagagccagattagagtctacacttgccacttagttgctgtgtgatcttgaatatgtcacttaactttcctaagccacagaggcttcatctacaaaatggatcagatagaatctacctcacacagggatatcatttggcatataatcaatgcttacagaagctttgtcctcactgttcacaatgaggtcttttcatagttgatctgtattaatttaaatgataatttattttaaaaagagaaataacatttaacataagtctaaaaaagataagaactagttcttaaattaacttcatcctcctttggttagcattttttacataggtaacccatattttgcctaggctcgctatttcttttgacatctatatagcattcaatatgttttgttcattgtcttagtctatttttcattgcaataacagaatacttgagactgaataatttataagggaaagacttttttagctcatgattctagaggctgggagggccaagatcaggcagtcatctttggctagcttctgatgtgggcttcatgctatggcatcgtaacatggcagaaaagcagaaggagaaatagacatgtacaaagaagcaaaacaggagaggcaggctcactttattacaacgtattctcatgagaactaacccaatcttgaaaaatagacattaatccattttaatcacttcgtaaagtcactacctttcaacactgtctcactgggaaccaagtctcaacataagttttagtggggacaaaccatattcaaatcatagcttcatcttgatagagatgtatactcttaagaaatctaactaaacaaattagtcataatgataggggctctggaaagtctgaatgatttagtgtagattaaattatagggccttatttcaaaaaaatatgcataagctgattttagtactgtcaaacattttcaaaatggccattgacctataaaaaagaaaatgtagtcacggcacgatcttctctgtttattaaagctgatctgtttctctctctgcatattctctattctcatctctccctggccatattcactgaccatcttgccctcagcttgacagagacaactgaggccatcagttggataagaagtctattaatcttgatctcccatctcagttcagcctctatccctctcctcttctatctcagcagggtcttggatctcagtgagttgggtcatcctttccatcccccacccccatatttgtttcttcaggctgttagatctctcttagttttttttttttctatcttcagtgtagcatttttcattgtagataataggagcattcttcaaaacccctctcttcacttggtttctctgaaacacccagccctttcttgatcttccttctacattctggtcttcctttctcagtcttctatctgacctgctaaggcattaaagtctacattcagaaaggaccacagaatcctgttctttcagcatgtcagaaaataacagtaccattagatatcattgtttgacttaggtggaagagacatttatattcaaatctttcttcgttttatatagcttatatggcggaattaaaaataaatatatttaccatcagtattttattacatttttattgcttacttaccttaggtatagagaatattcacaatgttgtcatgatttattgtcttccaacaattattaattgggaatccctatgggctggacattaagaggattatggaaaaatataatgataatgattacccttcatcgatcctttcatgtttgccagaaagggaagtatataacaagtttgcacagtaggtattaaattctccaattttacataaaatgacgttgggacttcaagttcacaagttcacacagcatgcaaccgaagagctgggattcacgctgtgtcttcccacctcaacactttctttatatgacttaacactaagtataagagatcttaacaggtacaagttatgaggaggagtgattactatgattagcttggagttttgataaaactaattatataattgtttttacttattgattttttctgaaattaacaaaaatatgaagttcttcagggtcttggagtattgtaaaagacaaaaagctatttctatacagatttttcatttcaatgtacaagttgatttcttcctgccttataaaatcatacactttgaaagcaaagctaagcattgttttgtaaaaataataacaataataataattcattcgaaaaagttcaatgctggccttttgttagtcactcccaagacaaatggactaggaatttttatatgattctggaggtgctaaagctctctctccctgacagctcattaattattgacattttctctttttctccccatgggattctgggactggaagagaccctgttatatagtccccatatgaaaataagcaatgacctgggacccaaatgaaatcacgaaggcctaatgagaatcaggaggtgcatgtaatgggaggcaggcagtgggcctaatgagatacttagcagaccctgtctcttctttctattaacctttctctctttttcagggtaatgatttagggtgtgttttattggaatttttagcatatttcctcttacagttttttatatttttagagttttctagtgtactgattataacggcatgaggtggcaaggttgtcttagtataggtagatacaagggctgatgttaaggtgaaaagggaagcctttagtaggtctggctgttttcctgacaccttgaaaatgcccagtcttttgtgatcttggaagctggtttatttatatttggtgggaatataaatgctacagatcttgctcctagacagggaagatgagatgataggggatgccaagtgacaagtcatataaagtgatagtatgttgtgaaggtgcagtctgtgacagtttctagaatcaatggaaaaagagctgggaccaactaaatgcctgtcatgagtataggaaggagaagttgtggtggccatattagattttgggcatttctgtgtaaaaagaccataaatccttggaggcaagaattgtatatattggcacaaggtagtcaactaatatttagaaataaatagggattgaattaaagggatacaaataatggttttaaactcttttcaagtctgatttttgggatatatttgttggtaaatagttcttaaatgtgagcaactgtatctacgatatctcagaaagtactggtgtgttttagatggagaaagatgtattcctaagaaatttaaacctcaagtttgactatgaggtttgtggtttaagtttatattgctatgaggtcgagagacacaaactgaaaaatcaatttcaaacagaatcttaggttggaagtattcttggaacaactggctaaaacagtcaaaaagcatctttggaagaccacagtctcagccaagagcacaaagatgtcaccttcactacagccccaccaacacgagctcacaatccaaaatctaaaatctgcaaggaaacaaatcattgagagacagcagagtggcaaacaacagaattagacctcaagatttttatataatataataactaaagattataaagtttgcatatatatacttaaagaaatgaaagatgaaaacaaaaacataagaaatgaattattcaaataaagagcaaacaggttgaaggaatttgagtacttataaggggtattaagagtaatccacccaaggaaaatacatgtatcaaaatagaatatataactttctacacagaggagacataagaaagaaaaaattaatcaatacaaaagaaggcaggaaatggaaacagcaacaaatataaaagtatagaaaaaggcagagtaatttgaaagcatgtggtagaaataaattcaaatatatcaatagtaaacaaaattgtaaatgaattaaactcatacatcaaaagggaaacactgtcagattttactttttaaacttgttattgaattatacatgaagaaaagcgcatatatgtatggaacttattgaattcttacaaactaaactcaactgtataaccagcatccagatcacaaagtataacattaccagcctcctagaagcccccttcaggcccctttgagtgaccccttccttctccctgaaaaagggtagctgctatcttgactcaataagtataggttagttctcatttatttacctagattttattaaagatttaaatatgaaaaacaaaaatcataaattgtttagaagacagtctttatcatttcagtttggaaagaattctaaagcacaaaacattataaaagattggtcaatttgattaccttaaaataaagaacttttgctcatcaaagttattttaatttaaataattaaagaatttaaaatgatataaattctagtcacaaacaggagaaaaatttgccatttgacatatgactgtcaaaggatcagtgtccagaataaagaattacttcagttccataggagataagctacccattaatttaaaaatcagcaaaataaatgagcaggtgtttcgtaggagaggaaatcttaacggccatcagtatatcataaaatgttcaacatcagtggtcctgtggggagttcaaattaaaccacaactactagattaggaaaaatgaaatatacagtacaaggttaagagcacagactggagtcagactagctgggttcagatccctgatccatatactagttttgtgctcttgggaaagtcactgcacctctttgggcttttgttttctcatctgtaaagtgaggctaatgattcttcctacctaatggaattattgtgataattaaatgagttatgtgtttgtgtgtaaagtattataacaggacctggcatgttataagatctatttgttaactatctttatcagtttggactgctataacagaataccactgggtagtttaaacaacagttatgtcttacatttctatactctaaatccaagatccaagtgctggtagatttgtatctggtgaggactctcttcctggtttgcaggtggctaccttgttgctgtatccgcacatgatggacagaggacaggtctctctctcaactctattcttattaggacactaatctcataataagggctttgtctcatgatctcattcaaacttaattacttcctcccacaaatgaataccatcacagtagggattagtgagtgcttcaacatatgaatttcaaggagacacaaacatcagtccatagcaccatattagcaattatgactataggatgcccttggatgacttctgttttctatctaaactcatttcctagatgatctgatttagactcatgaatttaaataccacttatttactgatagtttccaaatatacatctccagcctggagtcttctcctaatctgtagtcttgcatatccatttgccttctatatctattatgcatcttaaacttcacacatccaaaattgcctccccctttcctccctattcactcacccaaacgcctattcaagcattaacttcctcattaggagcaattctattcttctatttgttcaggccaaaaatgcagatgtcttatttgatttatttctcttacatcccaactttggtccttcaaaaaatcctctcacctctctctactttcaaaatatatacagaattgtgtctcttctcactcgccccattgcccccacgctggtccaggccactaacatcttccacttggactatgacaataaccttctaaccaggctttctacttcagccctgaccctctctaggcctatcttaatagagtagctagaatgatggtgttaaagcattatcagatcatgtcaccttattcctcaaaaccctctagtgccttctcttcttccaaactaaaagccagaatcatcgttaagtcttgtacattcctaggtcacctggttcctgattcccacacttatctcctcttcttccattctacttcttgctccaacctttctaggttccttgatgtttctcagggtctttatcttgctcttcactataactagagtgtccctcttccaaatgtccacctggcttgctctctcactgttttatttttttagggaaagaaaaagccaaataagcctcctttcagtgatacctttgttgtacactacctaaaatttcaacacctacctcaacatttgatctccctttatgctttctttttctaccttagctcttgtaactatctaatatactagatgtttaagttatttgtcttgtttattggctcttcctcataatttatgttccaaaaaggcaggttttcttgtcagttttgttcactactgcatctccagcacctacaacagtagctggcacacagtaggtcctcagttgctttttgttggatgaataaataaatcaacaaatgtcaagtttgggcaaggatgtggagcagctggaacatttgtttacatactacaggtagaaatgttgttgtgacacaggaattccacccctagtaaataccatctagttaagtgcttcctatgcacatcaggagacaagtacaagaatagtcaaagttccactgttccactgtttgttatagcaaagcactggacacaaccaaaatgtccatcaacaatagaatagatatgtggaaacacatttccacttatttatatcatatagcaaggaaaatgagttaatcataactatagccaagccatgtgggtgaatttcaagaactaaattttgagcaatatatgcagcattatttcacttacgtaaatttgaaaaacaaaaaaccaaataatacatttttctgtgatactaagatatgcaataaaagtatagtgaaaagcaaggtaatcagggacacaaaatttaggacagtaattactgcagcggtggacacgatgggatggaatcccagaggagtaaagagcaattctgaaatataaaggtcatgttatttctctttgactgtatgaggagcatatagatatttgttgtatgtttttatatttcacagttataaacattccataatatctactcaatagataacaaataatattacacaaaaatctaaagaaagtagttaaacagccctttctgcgtggtcacgctgagccagcgcctgggcctggaaccgggctgcagcccctgagcttcgcccaccacctccctgccatggacccccgcaaagtgaacaagcttcgggcctttgtgaaaatgtgtaaggaggatccgagcgttctgcacaccgaggaaatgcgcttcctgagggagtgggtggagagcatgggaggtaaagtaccacctgctactcagaaagctaaatcagaagaaaataccaaggaagaaaaacctgacagtaagaaggtggaggaagacttaaaggcagaagaaccgtcaagtgaagaaagtgatctagaaattgataaagaaggtgtgattgaaccagacactgatgctccttaagaaatgggagatgaaaacccggagataacggaggagatgaggatcaggcaaagattaaaaagtggaggctattgaagccctaaccgatggtgaactccagagagccattgagttagtcgcagaggccatcaagctgcatccttgcttggccattctgtatggcaagagggccagtgtcttcgtcgaataccagaagccaagtgctgccatccaagactgtgacagagccattgaaataaatcctgattcagctcagccttacaagtggcgggcgaaagcacacagacttctaggccagtaggaagaagcagcccatgatcttgcccttgcctgtaaattggattatgatgaagatgctagtgcaatgctgaaagaagttcaacctagggcacagaaaattgcagaacatcggagaaagtatgagcgaaaacgtgaagagcgagagatcaaagaaagaacagaacgagttaagaaggctcaagaggagcatgagagagcccagagggaggaagaagccagacgacagtcaggagcacagtatggctcttttccaggtggctttcctgggagaatgcctggtaattttcctggaggaatgcctggaatgggagggggcatgcctggaatggccggaatgcctggactcaatgaaattcttagtgatccagaggttcttgccgccatgcaggatccagaagttatggtggccttccaggatgtggctcagaacccagcaagtatgtcaaaataccagagcaactcaaaggttatgaatctcatcagtaaattgtcagccaaatttggaggtcaagcgtaatgcccttctgataaataaagcccttgctgaaggaaaaaaaaaaaagttaaagaaattgacatgctatttattaaacaagaatttcaattactcaataaacagaaattgctcaaactcactattaatcagggactacaaattaaaatgattataagataatattcataggactgaaaaaaatttcaagttgctcagattaggaattggtaaggttttaggaaagcagatattctaacacactacccaagaagatgaaaaattatatactcatttaaaggacaattttgtagtatctattaaaagtaatcctgtacaaacctatgaccagcaaatttactctcagcatattttcagaatgatacctattttaaaacacatgaaaatacactactactttaataaatatacctctctcaataaaaatattttacatagggtaggagaggcaggaagcaaagaagggtaatcaaaggagactctgtcatcagtaatgctctaatttttaaaagcagatttatgtatttgcttgattgtaattaattttataaaataaatacgataaaagctgcatacccgaattttccagatgcagctaattaaatgtagcatttaattgaaattaaggcatttatatcctttaatgtttatgttaaaaggcacaagagacttaaatttaacgagttaagataccagtgtnnnnnnnnnnnnnnnnnnnnnnnnnnnnnnnnnnnnnnnnnnnnnnnnnnnnnnnnnnnnnnnnnnnnnnnnnnnnnnnnnnnnnnnnnnnnnnnnnnnnnnnnnnnnnnnnnnnnnnnnnnnnnnnnnnnnnnnnnnnnnnnnnnnnnnnnnnnnnnnnnnnnnnnnnnnnnnnnnnnnnnnnnnnnnnnnnnnnnnnnnnnnnnntgcccagaaagaattatttccctacttgagaagcctttactccacgaccaacatatattatagtaggagccacagataaatatttggcaccttcaatagtgggtaccttctatgtcctgggtactgggacccagggagaaataaagataagtaagacatccatgtttctccttgaaaatattttatgtaaattttttatctgacaaagctgtagttggactataacttctcagttaaatctgtcctactctctcacccacaaatctgtttatcatagcatataattgcagttggaaattttaagtcatgaaatcaaagaagttcagagctaagggaaactataaacttttgaacccagaattttattggaggaaactgaaacccagggaaattcaatgacttcaagggcttggaccagttttccaacccagggtcaacctggacatgggtcattgctcaagggatatgcactgtcaattaaaaatacacagcacctgcctctaaaaacatttggtatatttgttatatattgctgtgtaacaaattactcccaaatttagcagctttaaacaacaaacttgtattattatttcgtatagtttgtgaagtcctggaatccaggagtatcagctttgctgggtggctttggctcagggtctcgtgaggttgctgacaaattgttgatcagggcttccgtgtctcaaggtttggctggggctagagaattctctccaagagcctcatttacgtggctgttggcagaagacctcagttcttccacctgtgtcctccatcgggctgcttgggtgtcctcgtgatgtgaaagcttactttgcccagagcaagtgaaaccagagagagcaaaaagacagaagcaatggttctgattaactagtctctaaagttgtttactgtcatttctgccatattctatttgttagaatcgattccgtaaaattggaccatgagcaatgggaggggattaattcatttacattttgaagtggtggtgggggaaggggtgtcaaataatttgtggacattttaaagtaccaggagacccaatgccatttttggaagaaattgtttgatagtgcttttaatttcgtatatggttgaatatttaggttttctgcttcttcattcaattttagccatatccattttcttagtaaaccatctatcctacccaggttttaaaaaatttagtatcaacaattgttgaacactataatgtgtcaggcactgaacatatatgtttcatataagttattcttattaatgttcacataaaatctacaaggtgaagactattattaatcagattttatagtcttagagaagttaaggccacacaaagaatagagtagtgcatcacaactcgttgtttttaatgtcctttgtatgtatttgagtatagaccttttcttacagaaaattgcatgcatgtattttccccttttattaaatttatgaaactttacacgtgatcctgatcattttcaatttatttatgcattctattgttttatccttttatcactaatccattcttcttcctctccttgggctttctgtttttcttccctgtccccttaacagaggatgatgaagggaactccgttcctgcagatcaccactctcctccatttttttatttccctgctttactacaaccctgagagggccttaataggtagagccaagaatagtcttttcttttttcaccaaaatattggtgctgtctcatcatctatcctgttcacctatttatcttatgacagatattattctgttttgcctctgctggcttgctttcttcaggattcatcagcattctacataactaagagtacttgaacaatgttattgttgttttattctgcttctttatcaccatcataaaaggctctgtatcagagtcacctcccaagactatctctacccaataggcaatgtcttggtggcacatactaatttacctttaaatgtcttactaacaagtctccaaaatcttcccttaatttttctttctcatccccaccaagccctaagaaagtatacttacctcatttagccttttctaaatattaattttctttattatattttcccccaaatcatggttttgtattctttctcactatgtagagccccaactccttaaaaagatagtgctcacttgcacactctctctctctctctctctcttaatttttcacttttagaaaacaaaaactaccatcatcaaagcttggatatcaacatataaatttcatgtccttctatgtatggatctgattcaatgcataatggaaaattttatatgaatggaatttaggagatcagctggcctggtacctgctttgataacactcaagacagatggtcgcccactattaccttaaaatttctaaggatggcaatggcataaccccctttaatagcccattacagttttatcatcctgtttgataggtgtaagtatgaagggcttcagtctcataatggcattttagaatgataaatggaaattactgtaatttttctacttatttcaattaaattttattgatgcaatgcagaaaacatcaaggctgaatatgtgtgcctgagcatgtgtttgttaaagaatgttgccaaatttaaggatgccatttccttaataatcttgaaagatgcagcaaatgtatttaataaaacgttaagtctttgtgcaattccttcagaaaagaaattgaattgcttctggaggcacagctcaaaaatccaaagaatcctatcagtggagatatgatatataactcctaataaagtacccgagagggaaatctaacaagtgagaacaagagtttggttttaggagagtcacttaatacaattgctctgggttacattgaaaaaggacttgattggaatcagctgtgaccaatctcttcttaagggagaataaactgttatgatagacctgcctcaacagtgaatacctaggtaacaaactattactgttgtatttttccactggttctaactgttaaaaaaaaaatctctgctttaaaacaggtttcttttccttgtttgtgctgtgccttgctttgttcaaattaaattttcaagaacaaacaggaagggaaaagatccctgttgaaaaataaaggaatgcttctgttaggaaagaatgtctaaccttgccttagtcactgtaagtatatgaattcacacagttcttttcccctagagatctgtgaaaacatgatcattgagactcacatctggagaaagtgtgatttggggtttccaggacaattgcttcataccctagcccttgacttgctttctctttctgaagatgttgctctgattatagtatgggggcctataacgtagggccgggatagaagatctcttggccaactagaaacagacaggcacacagagatcagagctagcacttggaatgagtcctggcagagtttcagtattctgaattctgacacaccaggtttctggatggttaatgtgaagttctgtgactagtgccgaggtcttccctagggccacaaaagaaattatgttttaactttttatgtccttattcaggtgttcttaaatggtggtctgcaggctggtgtcatagtgatccattattacgacactgcctgtattcatttctggcataacttaataatttgcagtatcccctagggaaaacactactattcttcccctttgtactgatttattgtttgggttttggcttgctcttatagtaccaagttgaggtctataggggtcttttgcttcatccaagcatactagagactaaaagagtttgagacaatctaaccttccagggaaaaaatatagtctgatttaagggaacattttcttcctcatttgaccctgccaaatgtttcatgtaatttctgggctgtttgtaggacttggatatactggcctgtagaataaggcaacatcactctttaaggatattccctatgttctaggcagaaaacactttattataggttccagaatgttcatggacctaaggcctaggcaacccaaaagaaggaatttggatttcatccataattgggatttagacatgtagtgatatatgtgtgaaaagaagctaatgaaagaagtcagacacaggaaaagataactaaacctttaagaggaaaattcctataaatggaaaggagtttgatgtagcctgagggccagcatcctgttgtgggacactgtgagaatgaagctggccctcccaacccacctgcctgctggtatgcttgcactctgagaaagggaggcactaaatggtaaagtttcggggggagtaaattgtttccctgggaacacaagtgaccctgctggagcccaccccatccccggaatgctgagatgtaaacttgaaagaatttgagtggatgctcaactctaagggaccatctctgaaagaactgaacacataaaaatgaagtaccttcctgctaattgaagagaaataagtagccaagacagacagtcaaagatggagcttaagctgccagaggcagaaaacatagcagatactctaaggagtgaggcagtcctgaaattgcaggtggcaggtggcagcagagtgggcagcagtggggagggagcacaggctgcagttggaacccagcaagggcaggttggtgcaggcagctgagggatgggcagctccaggctctgacaacacatgccacccagctccctcctcttggaaactcccagagcagtaatgctcaatcctgggtgcatgttagaattttttacaagtcccagatacccgggctccatgcccaggatttctaatttatttagtctggagtgggacctcagctgcagtattttaaactctacctaagtgattctaaagagtggccagagttgagcatctagaaagacaccagatgctggacaccagatgctgaggtcctgtcattttgcaggtgtggttttggattcagcagatcagagccaaactgtccaagtgagttcaaggggaaaccacatgctgataggcttgggacttgggactctagagagtttaaaaaatcttgctggccagtggctcccccagagattctgatgcaattggcaggaggtgcagcgtgggcagcaggattgtttccagcttcccagatggttctaatatgcagcagcgcttgagaaccagtgacctagggcacagtaatgtcactcatgaagatccctttggggagtcctgtaaatatttaagagaaaagaaaactctgcaagggattttatattctgtgtgagtaggtggagacttagaactatcaagatttggctatttgtataagtacatttatattcacaggcagggtgtttctaagacattacccaaataagtattcccacagttctcagatatgggaaggcagtcccacagtcaaaaccaaaaagaacaattgtcaagctcccttctacagtgacttgcttgcctgcctgaagctcacaaatggaggtttcactttaagatgcacagattcattgtagtaatcgcagcatgtaaaactgttaggctacattaaaaaatgggaatctactttcacttctttgattttaaacttagtaaaatacaaatttggttaatatttatggactaataggtgccagttagtgaaaattagtacctttgaccctcacaataaccagcgggctattattggcaactattttactgaggaggaagctgggatggagagagaataagtaatttacatgggtctacacaagtaaacatgggtgggaaaatgggactggaactgattccaagtccagttctttacccacctcacccagctgcttttctttcatctctattgagtcaaaagtaacctccagcttacctctcactttccagtttcagtttcatatagtaatttacatatgatgcatttcatgaaacacatctggaaagttactaagtatagaatctataggaacctttgctatctattctattatgccatagataattctagaaaacagtaaaatttcttcactttttccccacctacaattatttggcgccccaatgagtagtatcttctcagtgtcaattctctggaggtttaagagactgtaatgaaatctcatcagctgtgtttctaattagcattctctaccatgtgtgaattaggagaaaactcatcttgtctatttcttagaaactatggctaaggtacactttgataatgttcaggactgtgtatgggtggaacattttatatataatggagtaaatatgtaaagaagaatcaaatgtgtatttaaagttataatctatgtgaaaatattattatatatatttgggttacgaattgtagaatctttaacattctcaagagcattcatcttagaataccttattctactaccaaatcccttccccagtgaaaagcacctttgtatcttaagtcgaaagtactgtaaaatctcttatcaccataaggaacatattaaactcgttggtaatagataaagaaaatcctatttccaaaagtgcattttgctgcttaatattaagcaagttacacaatgttttccaaagttaaacaaacaaaaaataaagaaagtaaatttactgataatgttcaactggacattaaaatatactgctctgatatcgttgtcagaaagcaaaaagatatgacctgactcgtttttagcttttaacatgtatctttctgttcagaaacattatatactagtggattttgtgatatagaaaatattccaactttcatgaaagaactctaaagtgttttaacctgtctttaagacttgctccagtctgtctattcttcagtagcttaattttacttcgacttgaatatgccttctcagtgcttttaagttattctttcctgaatgttttctttagtcaaggattatgatttaagtggtaacatataggaattaggtaccagatctccttttaaaagaagaatggtttaatttctgttgtccacccaaacatgtatatgattcatgtgatcaaagttactttttctatcactttttttaaggcctcaaccttggaattctatttgggagaaaaaaatgcttgattttaaattgcatcaaaagcttcagcttatgccacagagtacaaaaaagtgactgtttttaaggttttttctaaagcaaaatgttaggtgtatagtttcccaatgacttcagtaagtgttgcaatttaaagaaaatctcaagccaaactgaatgtatttatccaaatacatctttttgatcccgctattcagcatcccaacttgttgaccagagtttccagacatcaagcctagcacccacttgggtcattaagaaattattaaatctgccctgttggtcagcacatggggcgcaggtaggtgccaggaccccagctctgcccttctgacacttcctgggagtaaacccaaaccttgtgtatcaaaatgccctgaagcttaacatcagccagtggtctgcctgctaaaaaaaaatcccaccatctgtatccaagcagcatcattgcctgaccctggagagtagcagttccagagctctgggtgaggcatctaatgcagtgagctccaggagagagcaattagcacaggaatgaatgtcagacttctgggcagccattttgaggaaaccagtataaaatattcacattgtacaggccatcaaacttcatggtcacacttttttaactttgacctaggtgaacagagaattgatttgatttgtagctttgctgggtagaagttacacattatttaaaatcattttagaatttattttcaaatttcaaaaagcaccaaagcatccttttttatattcctttgacttccagatttgcctgattcatgaaacattattatcttttaattaatataattactataaactggtcttgagtttcaaagtatcatctaataactggattaattttcaatgtataaaatgtgggctttcttcccataaacagtttttaagtgaaatatgggcaaggtgattattatacccactttttaccatatgaaatctttaataaaagcatttgccatagctttgtaaattattccaacttgcaagatatgactcaatttattcatggatgcttatgttagaaactgcattatattttagacaacaggttaggtggactaaacctagaaatgtattgcattgtaggagatatctacattattattttctgaaaaatgtgcatagagcttttcataaatgttcccctcattaacaaagaaatgccatttcactttaactacaaagacctttccctgacagaggcatttgcaacaatggcctatttaaattctttctctctctttctcagacacatttttaaaaatacccttacctccaaatgattctgatatatgatatctaaagatgtagggtttttttatggttatgcatcagtaacacaacaaaggtcagctttgctgtgtttcacatatggtatgctcatgtgtctgactacttcatctgtgtggcctcacttattgcatttttccaaatttttgtgtcttcatcttttttggagcctcttctgctttggatctatgacttctggaattattaatacctggcctaatgcctaccagaagtcaaaggatacaaatattgaattatcctgtgtgtcttgaggtcagtcttcatagaacctcagcatctgggaattaaggcaagtaggaggacaagcactagatgtggaagacctgggttctcagcctgggtctgctcgtgtatttgtggtatgtcctggagcaaggcccccaggtcgctgtgagccagggcatgtcagccccacgagagcagggacttggtctggtttgttcacagctatattgcagtgtctagaaatgtgcccagcacatgtaggtcatcactttttatttgtgggtgaataaatgagttgcaatgttctctgtacaggcctgggcccacatgggcagttagtgaaaacctccatgggccctgctccccttggggcccacacaacacaggattaagttctctgaggggagtaacagggttctctggggctatataacaaaggaccccaatagagaagtccttgagaagagactcttcagctgagacctaaagaataattaggtgtgaacaggcaaaaggcgttggcaagaatgagagcattgcaggcagaggcctcatcacaggggagatcctgggtcacttgagggactgaagggccctagcatccctaaagtgattatctaagtgagatatgtaccagaatgagtggaaatatcattaaatcatagagttatagggctggaagaaatcccattactcaaactagcccatgtcggctacattttaccgtttgaaaactgaggaccagaggtctctgagcaagttctgaaccttaaaatgagggtttttttcctttttatattcgagtttcatgatttttataaaaattcgtggtacaaaagcttgtaaagtaaaatttaagtttccccactcaagaagtaactgctgtattagagactggtgtatatctttttagaagtatatatccattgatatttttaaacaaaaaaagtgattatactataattggtagttgtcaagctttttgataacaggacctctttacacttctagaaactattgaggccccaaagagtttttgtttgtatgaattatatccagtagtgtgctggagccagctggaaccagctctctacaccaggttcagtggtagcttgaaatctgccatcgtgggaatatttacatcatggaatcagcttgcactacaaatcagggctctccctgtccccccagagagccagttgttaaacatctagcagcataccactgattacatgtatcaatgtttatcatattagacacttaaaatgaggattttagaaatatttagtaatttattttaaaataatgataaatccattgcatgttaacataaatcacactttctatttttgcaaatttcttttatttctggtttaatggaaggcagctggattatcagatttgcttctgcattcaatcagttgtgattatcacgcattatgtagcctctggaaacctccattgtatcctcaggatagaatgagaatgaacaaatcaaaggatgtcttagtaacagtctgaaaatcatgttaacttcatgagctacctgtaagnnnnnnnnnnnnnnnnnnnnnnnnnnnnnnnnnnnnnnnnnnnnnnnnnnnnnnnnnnnnnnnnnnnnnnnnnnnnnnnnnnnnnnnnnnnnnnnnnnnnnnnnnnnnnnnnnnnnnnnnnnnnnnnnnnnnnnnnnnnnnnnnnnnnnnnnnnnnnnnnnnnnnnnnnnnnnnnnnnnnnnnnnnnnnnnnnnnnnnnnnnnnnnnccttacgcatccaactcattaaatttaaattaatgcatcatatcagaactaaataaaaccattaattagcatatattctcttctctattttttatcttggaatgttaatggtcataattcattcactcattaatttattaattcagaaagaatttatctagctcctaagttcaaggcaaaatcagacagtaaatttccataaacttttcatatagaccacaatatcctaagaggttaaacaggacaaaaatatgtctggagtcacagaaggttaagataaatttagatgttacatatgtacagagtttactaaaaagaagtgtggtgagtgttaagactgatgtcctggaagtcacttaccatgttttctcataactaacccttaaaaccactaatagagacaaaaatactatgaattgtccagtttttcctcaatgatgctatcatggttatctttgtaagacagaaatctgattattatcattatctctatgcctaaaaggctgaaccaattattacccttataggatagaattcttccaaggggagcatactgggacagtaaaatgttcatctggacttacctttcctttttcattctcagctgtcttccacacgcttcccttcagtgccccctaacctataccagcggcccacccctaactatttctctgaggcaacctgggacctagtcacagtgtgttacctctgtttctgggacttgtcaagctttttttttttcttctatttttattttagattgaaggactacacgtgtacttttgttacatggcatattgcatgatgctgaagttaggggtacggctgatcctgtcacctaggtagtgagcatagtacacagtagttgtattgtcaacccttacactttccctccctgccttctagtagctcttagtgtctactgttgccatctttatgtccatgagtgcccaacgtttatctcccatttacagatgagaacatgtggtatttggttttctgttcctgtgttaatttgcttaggataatggcctccagctgcatccatgttgctgcaaagcacatgatttcattcttctgtatggatgtgtagtattctgtggtgtatatgtaccacattttctttatccagtccactgttgatggacacctagattgattccatgtctttcttattatgaatagtgctgcagaacatatgaatgcatgatttttcatagactaattttcctttggatatataccaagtaatgaaattgctgggtcaaatggtagccctgttttaagttctttgaaaaatctctaaactgctttccatggtggctgaactaatttacattcccatcagcagtgtatgagttctctttttctctacagcctcactagcatctgcttttttaaaagagccattctgactggtgtaagataatatctaattatggttttgatttgcacttctctgataattagtgatgttgagcattttctcatatgtttcttggccacttgtatgttttcttttgagaagtgtctgttcatgtcctttggtcctttgtccaattttctttttctttttcttttctttttgtttttgagacggaggctcgctctgtcgcccaggctggagtgcagtggtgcgatctcggttcactgcaagctccgcctcctgggttcatgccattctcctgtctcagcctcccaagtagctgggactataggcgcctgccaccacgctcggctaatttttttgtatttttagtagagacggggtttcactgtgttagccaggatggtctcgatctcctgacctcgtgatccgcccgcctcggccttccaaagtgccctttgcccaatttttatggggttgtttttttgctcatttagttgtttaagtttcttatagattctagtattagatctttgtctaatgcatagtgtgtgaatattttctcccattatgtaggttgtctgtttactttgttgatagtttcttttgctgtgcagaagctcttcggcttaattaggtcccacttgtcagtttttgtttttgttgtaattgcttttgaggacttagtcacaaatcctttcccaaaactgatgtccagaataatattttctaggttttcttttagggattttatagtttaaggtcctacatttaagtctttaatccatcttaagttagtttttgtgtatggtgaaaggtaggggtccagtttcattcttccgcatgtggcaagtcagctctcccagcaccatttattgaacagggattcttccccattgcttttttttgttgcctgtgtcaaagaccagatgggtgtagtaggtgtgcagctttatttccgggttctctattctgttttattgccctatgtgtccatttttgtactggtacaatactgtttcggttactgtagccttatagtatggtttcaatttgggtaacttcatgcctccagctttgttctttttgtttaggattgcttccaagctctttcttagttttatatttttgcatactctattctttttgattttatcctccatgaaatctgcgtgacaatatcctaattaactctacacccaaactccaaaacacccaacccaaaaaccagcttctcatgaaaaccttgcctccagtaagcaattcagttctctggtttccatgacatgttgtgcatccctccatgttaatatctgccacatgtggttgtttgtgcatgtgagtgcatgcatgcatatgcatatgtatgtttgtgtgcatgtgtatgtcttctgctatattaggacctccaaaggacaagaaccacgtggtatttgcccttgtctccctggcttccagcatggtgccaaccatgcaactactgtagttcttagaacacaattagtccatatttgaattcaaaagctgtaaggtcttcagtcatatcctgagatgctgagttgtagcaatataaggtttctactctctaccctaaggatgcaggcagtcttaggaaaagccatcacaaccactcacttaggagctgagagtttttccaggaagaagcattcagccctcagtatgaaacttttcactccagtatgaaccagggactttggtttttgattgcctcatccttggatttgctttgacaacttcttgaaatggtgtacccagtgatttggcctcaagttaaatggcaaactctaattcctcctctcatctgtatgcattgcagtctttaatcaagtgatccctactcaactgtagtctaagagaaagaaccagacacatacgttatgctccatgtcaagtaaaagaatattagatctagagcatgatccttaaaacccagtcatttagttcaatcattcattttacagatggaaaaagtaaagctcatgtgtgttaaattaattatctgaggccctaccatgagtactagaggatgggggcaagacccagttttctagactttcagccaagtgtcctttccactatatcttgctgctcccatattccagatcctttatttgaattttcagagtcatgcacagaacatataatttggctcccactgtcttcttttattggaaatttaaatttggatttgcattgctgcttttccattcaatggcgataaacactataaatatcatctggggggaatggaaataaaataagcatctggaaagaatgtgctataatgaagatgtcattgtttgcccataaatgctagacaaagaatctggcttttcaaaagcaaatacatgaaaacatctatgtccatcccaacttgtatttgtataaaaaattaaaatgtactgaaataggtagattttcaaaaagagcagaatcaaatactatataaagtaaatgactaattatctgaattggctgaaagtataataaatacggccaaacatccatttgtttttccttccacccattcaaggtttactgaataaatgataccccacaattggtgctatcccatctactaaccaaatgatatttagtaagaggcaacatagtttgaaccacaaagtaaaacatctgagtttgaaatctgctacttataagcctagaaaaaactctaatacatcatttttttctttactgtttcatctccttaacataaacaagcactgttatttctcctaccttaaaaataaaaagatattttctttggtcctacttcttcctccagcgatcacctcatttctctgctgcccttcagcaaaactccgttgaaggacttgttgatacaggaggtttccaatttctttcctcttattctaccttgaacccattctattcaggttttctgccaacattgttcttatcactgtcatcagtgatgttcattttcttcatcttacttgaaatttcagcagcatttggtataattcattatgctccttgagacactcttcttttgacttctaggacgccatactttgcttttcttttccctaatgtttattacctttcaggctcatttgctgattttggatttcttaacattggagtaccttagattggtctttggacctcttctctatcactgtcttagagatttcatccagtaccatgttctcagtatcatctgtatatgatatgcaattatcatctctatatgttagtcatatgctgatgactctcaaaattgtatttttctcctagacctctcttctgagctccagaattctatgtccaactggctacacaacagctccactttgactaatacacatcccaaacttaacaagtcaaccctgggctcataatttgtcccccaaacctgttactcttccagtcttccctagctaataccggatacttctattcttctaaaacgtacgtacatgcctgtacttaaaggtctcaagtgtttccccacctcatttgggctctccatgacctgtctcttctcactgctctgctatttctctcatactctcccttgttcactccataccagccacattggttctcctgccccagggggcctctgtacctgtcattcccagtttctctacagttctgtcccaaatgtccacatggctccctcttttactttttttcaaatatcaccttgctgaggccttttctggacacccaatctaatattacaagcctgccttcccatcatatactcctagctactcttccctgctttattattggccttatgtcttaccatgagtgcactatatactttgcttatttattttgactactatgaagttcctcaactagaaattctttttttgttcactgttgtatccccggtaccttgagcaatggctggcacaaagtaggctctcaaaaaaaatttgttcaatgcatgaatggaatcagcgataatgagagttacctcttaggtagaaaggtaagtagaaagtaaatgagataagtactttgtacatgttaacgcacagtaaatggtaattatttacattcatttcatctacccatgtgtatctgttggaaataatttttggtgccaaccatgtgaagggaaggagaaattctaactaaaagggatgctatggaagtacatggttttgcaagttagtctcaggcaaggtaaatacagccgatgggaacaccctggagtttggcgcagatagcaagctcccaggcctgtctgggggtggtgggggtggtgagggaatgtgggaggaaaggggtaggaggaaggctggaaatcatctgagtgggttcatggggtctgtacatagtcttctggatggccctgggtgagacctccgggctacactgctgtgtgctgatgtccatcttgagtatccctagcactgctcagctcccagggaaagagacagggcttacagtatctgtctgtctctaggacttgatgtgcacaccctaaagcaacaaagaactccaagtccagggaaatgaattgctgcatatgttcatatactctttaataggatgctttggtattcaaaatacaaatccttatgttgcgtaacagcatcatagtgcctctgtcatactgctttttgcctaacacatagcgatgttacatgtgttttcataggttgaagcaaaaatgaagttcctacatctaaagggtcattatcatggacaaaacatatcttaaaatgaaaaaatacaactttaaaaaggcactctaattcttcaagctataaagaatgcataattctctaaagcctttgtatccagatatagctatttgattaactggtatagacacagttgaatagaactattttgtaaatcatgtcatctttgaattttataactcaaaggtgatttacatggatttccctgagtttactaattggcttcctacactctcattaaacagtcctggcaacagaggcaaagcagctgtgtaactgctaccttcccgttgacagtgtgaacacaacatggggatatgtagagcaagatactgtaaccatgtaacatcatataatacttcccaaacctttcccagtttcagaagggacacagtggcaacctctttagtacatgcctcagcatttctctacaacttgtaattcgtttcccatgagaatttgaactctgcttgttacactagtgcagagcctgtagtgtggctaagagcctctgactgcactctttcaaagtggggaccttagactctgtttactacagtatgggatgtgcatgtgtataggcatgcatagatatgcaagtatgtataaatatgtacataggctgtgtatgtacatattataagaaaaaaataagcagaaaatgacagatcctgatagaaaagaaatgaagaaagggatgaaaatgaagtggaagggaattagcatttattaagcttctgctatgatccaggcacccccaaaaaaaggcagtgtggggaacaaagatggggatatgcagttacctagatgttaaggaaagaacttgtaacattctccttccttaaaagagaattctgtaaaaatgaatgctggcaacctgtcagggagggcttttcaagccattcagagggagaacagaaggctatgggcactgattttggctttgtttcccctagatgctgggctgctgtcatgccatgagatgcgttatctttgaagttctgctgagcagtctagatagaatgacttaaaagtgcaagtccctaaacagggttcagcttcccagaatacaaatatgctcagagaaccaaaaagaggttaggaaaaaaacagcccaagacatttccctttaagccctagggaaagctagtagtattcaaaattaaaaggattctgaaagactatatgttggaggtttctggatattggtatcagtttttgtttggggggcttttttcttttgtttcactcagggggcctcaagatttctgtaactgcatcttgtgattcttctgaggcatttgcagtgataggcagaggggaagggtgacctcgcagagtccctgggcaggtagaggtagagtcaagcttgggatgtgacaaagagggatgaaagtgatagctcattctggagggcttcaaagtaagctttcaggaaatcctgtttaggaatttctggtcaattacaggttttgctttggttgcttttgctttctctactcccactgccctaatatcacatcagatgtcctcagcatcaccatgtttattataagagacctctctgcctccacttgcattttgggctagattgcatcattcagtccaattctccatcattgcctatgtccacattctttgccatataactttgcagtgatctcccactgtggtcagggatcagcttggcctctggactctggactatgccatataattttccttgaccaatgagatatttaggagatatgatacaagcacagtatggaaatgtaacttcttcaacactggggctttcttttctatcaggagaagaatgacaaacatgtggccctagcaaagcccaccagtcaagcctactttagaatagagccccccaaaaatcaacagacgtatacataagctcagctggtacaagctgatgcacccagtccaaccccgataaaaatggctgaagcttgcaggtatgtgatcaataaatgattattgttggatgacactagggttgtgtggttgttacacagcaaaagctaactgatacaagtgctgtttggtctatgttcctcatgtctcccagagtcatattcctaaaatggaactacaatgatcttaaaattattttgcctaggacccttcaatgacttcttgttatgggctgaactgtgctcctccaaaattcatatgttgaagtcctaaaccccagtagctcaaaatgtgactttacttggaaacggagtcattgtaaatgtaatcagctaagatgaggtcataccagagtatggtagcccctaactcaatatgacccgtgtccttacaaaaagaggaaatttggtggtagacatgcatgcagggagaatgctacatgaacactaaggcagagattggggtggatgtgtctagaagccaaagaacactaaagattccagaaatcttccagaggctaagagagagagagatagaacagattctcctccacagccctcaaaaggagctatcctgccaataccttgatctcagactctggcctccagaactccaagacaatacattcccgttatgtaagccactccccattacctataggttatagtctaaagtccttcacaagatacgtaagtcatttcatgagttggtctctgctgtcactgtatcccacttgctttagccttgccccattcacaagccatgctgaactatttacagagcttccactggctgctcaagagatattgttcatgctgatcccttggcctcaaatgcccttgtggctaccttctaccctctagtagaccccagatctttacctagttaacttctatttatatttcaagctccaggttgggcatcatctctggaaactttctcctgactttctcaatcctaactgtagggtgatgtcctactaaagctccttatgcacactatagacgtatttctatgacaatacttataaaattgtggcaagttgtttgcgacacatctgtgtcctcagaaacagtcttgataacgaacctcttgaaggcagggccataaactatctgttcttgtattcctagtagctagcatggtgcttggcgcagagtggctgtgcagcaaatgtctgtggaaagaatctgtgtgtttatgtggaaatatccaaacagatgtgttcttggcataagggagatatattctgcttgtgtgacaactggcagttgagtttgcttggcatcaaaagcacccaattaaagaccaaacctcacttccttctttttcttcatttccttctttctctataactacacaatctcacatgccttataatgcttttagatgtaagtgactgtgaattattaccaactgtatgcctttcatctttaagactgacagtctaagttcaacatctctcaggagggagagactattataactatatttttgcttaccaagagaattgttaatggttatcctggagggaaaaaaatctataaatatccaactcgtaatgaagccttaagcttacattcttcctttactaatgaaactctttctgactatactgccagaattgctacataaccatttcactgagaaaagagaccaagtctgtagtaaattttttcttttacctgtttagttcttattttggaatccgaagacagattgttgtaggtataatgtgcttgtgtgactccacagaagagaacagcaactatccctgaaattaaaaaaacagatcagtcaaaaccaatttttcttttccatccaagtcaaaggttagggctattccagttggaaaatagacttggtgtcagtagagttaaaactgctagtagttaccatgataatgcaacctaggtaaatcttgcacttgctttaaacagggtttaaacagggtcctgaaggattaaacctaaagaaaaacattaagaagtagattctaaataaacatgagaagtagattcttcctggagataaacgggtccctgttcatgagctagaaaagttatatttgaaaacatgaacaaaagactccatagccaaccctgggtttttcatagccagtgccaactactttgctggattttatactaaatactggcatattttctgaaagatatttgctttccgctgtatactttgggtagcctaaagaagttcctgtcataccataatttagtattaaaagtcatgagtgacaaacctaagacatccacaagggttttgctgcccctgccaacgctcctacttgccaagcaagagaaaggagaccttgttttctcctgtgcctctttggaaaggctgggtgctctgtcctgctgccaaacacacccaaggcattcactccttgaaagtaaactggtctgttcttgtgtgattcctaccaacagtggaccttcagttgcttcttgacatctgcagggtttagttttaaaccacatatcagctttaaatgtgacatgaagtcacacatacactagatgctttctggagacagaggaagagcgaccatgagaccgacatgctatctgtccctgggctctgttattctctgtgttattgtccctgggctggagtggggaagcagtgggagcttgcactgtactttgggttaaagattagctcaattgtgggaaattgggcatagaggagggctttgggaaaaatgcaagatataagtattcctcgactcagaccaaggggattgaattgaattttaagcagcaaaatctttccaactaaaaacactcataaattaaatgctgatgattcttaagagtatagagatatgtgaactgaatactgacatttcaagtgaatctgcaacaaagaattttaaagaactgagctttaaaaaaatatgtagactatatgcttctatttacatgttggttatttttcaggtcagcattggataaaacattgctaacacatatttgcataaatgtgtaaaatctacatgacttattgtcttttaacattatgcttcaaaattttagacaaaagaataaaacaagtaggaaattttaccatgaaatatctattcagtaggcaattcaacagatttttggtaacttctcagtttcttagcatctcttcagaaattctaaggcaaaaattcttataaactattttactattcacagaatttctattttaaaaagcaacaaataccagggaaacttttagtgtgctgaagcactaagtacttcaaagcacaaggaggattaccctgtatactgttttggcataaatcatttctctttatttatttaaaaatgtggcctatgtctgtctagtgtgtagtctattgggggttttctgggtgaggttttgctgacctgttcactgttttgactagatattgatctgtagagaagtagtgaataaaagggcaggtgtgtctgtgtatggatagcaaataaattcattgtaagaacaagaataggtaacaaagaagtgttacaaaggataaggaagggactaagattgtctgaatacctactgtgggccaagaacagtgcttgtttaatttacatcttcttatttactgcagtgagttactatctcacaacaggctcacaatgattaagcagcctctcccactgccttctcctttttagtaatagcatccattctttttgctgcccagggggaaactttgggaccaccctaagtgcacctctcactgcaaatcagcaattttgtttacttgtccttcaaaatgcaccttgaacccaaacacttctcaacatctccatccctagcatccctttccaagcccccataacctttggcctggattacaacgatagcttcctaactggcctccctgcctcccatggtagcccctagcaataacgcttctttaaaaactagtcagaccatgtctggcctttgctcaaaactttgtaatggattcctgtggcttaaaaggtcctgcaagatctcttcctgccccttccccactccccacaacttgctgacctcttctctgaccactccccaccgccttacctttcaatatcctctctaagtatgttctgccaggggcccttgcacttccttccaggtcccactgtttggaatgctctgcagatatccacatggctccttccctccttcagatatctgtttagatgttacatgagcagacaggtcttctccatccactctgtacaaattgttcagtctcatcattctctacttgctttatttttttcctgtactatatcttgctacttgatattttatatatttatgtgtttattttctgccttcctgcatgatatggtttggctgtgtccccacccaaatctcatcttgttgtagttctcataattcccacatgttgtgggagggacctggtaggagataattgaatcatgggggaagcttccctcatactgttctcttggtagtgaataagtctcatgagatctgatgattttataaggggtttcccctttcacttggctgtcatatctctcttgtctgctgccatgtaagatgtgcctttcaccttccaccatgattgtgaggcctccccagctacgtggaactttgagtccattaaacctctttttctttataaattatccagtcttgaacatatctttatcagcagcatgaaaatagacgaatacactgtaacacaaggcaaagctcattgaagacagagggattccttgattcctaatgattagagcagtaccaggcacatggtaggcactccgtatttgttgaataaataagtgaacattcccatttctattgaacaagtaagacactaaagtaatttactcaaggtcacctctaaagtgacagagctgagatcaaatagtccatagcatccctgtgcttttctgcctatattagaccatctgtgaatgttttaaggtgatcttaagccatctaaaaaatatttctgatatcccaggaactagccagagattttacgaaaaagattacatatctctctgaactagctgggcttatcattggagaatattttccctagtggctgcattggttatcatttccttgcctccagtagaaaactaacaggctatgttgttgctaaatatcttttgagtcttgtgtggatggatatgtcatataaacaacaaacagtggagaatgagcccacatgaccagaggcttggtgttgtaattaaaataaaacaacaaaattgatctgacccttagtattagcatacacaatcataattccatagcttagtaataaattaaatcacacaaattactgtaattagtatgacttttacaagccaaacacattttgaaaatgtctcatctaaatacatctattatctataaaattctccaacacagaaacaaattcaaagttgactgttttctaccttatgaaagaacattttaattatcactatgtttttatatacccatgcctgagtcctaattgtgaagctgttatgtgaggtcctagatagttctcttaaactctatgaacctcagattcttgtgtgtaagaaagagggtgagggggaccctcaaggggcctagaagtgctttttgtgccagtcatcaaaccagtgtctcagctccaaacccacgtatctttactggctctgtgatcctggcacaggggccctataaaccatgctttcctttgccagtgctgttggatcctgccagtatgaagtgccagaaggtgactagaacccagtggaggagagaagggcttgcttcttcctatttgcctgctcttcctgctagcttcatctcagcaatgatacacctcagaaagggcagccaggcagtgtccttagaattctggatcctagcccagtggttgcctcttaggagcttctagattcatttccctttacttttcctactcctagggttcacacttgcttcctgtaagtattacctctctgttacctttatgcacactttataccttttgagatctccaccaactctctacccaatttcctgaattaaactctgtcaatagccagatcgttttctttttttctgagtcaatcctcgttgatattctcttgtggttatcttctctttctaaactttgatagttcttggaaaccacagttttccatttgaaaataaaatccaacttgtatctttgctgtcataactgagacaatgaggaacactaggggcaggcaagaccatgtgccaagtccaagagaactggaactcatcctcttttcagttgtacctatggttggaattggtatttttaaaaagtgatgtggttatatggtttggctgtgtcccccatcacatctcatcttgaattgtggttctcataatccccatgtgtcaggggaggaacccagtgggaagtgattggagcatgggggtagtttcccccatgctgttctcatgatagtgagtgagttctcactagatcggagggttttacatgtgtctggcgtttcccctgcttgcactcattctctctcttgccaccctgtgaagatgtgccttctgccagaattgtaagtttcctgaagcctcctcagccttgcagaactgtgagtcaattaaacctcttctttataaattacccagtctcaggtatttcttcatagcaatgtgagaatggactaatacagtaaattggcaccgagtggggtggggtgtttttataaggatatccagaaatgtcgatgcaactttggaactgggtaacaggcagaggttggaacagtttggagggctcagaagaagacaggaaaatgtgggaaagttcagaacttcctagagacttcagggactcagaagacaggaagatatgggaaagtttggaacttcctagagacttgttgaatgactttgactaaaatgctgatagtgatatggacaatgaagtccaggctgagtggtctcagatgaggaacttgttgggaactggagcaaaggtgactcttgctatgctttagcaaagagactggtggcatttttgcccctgccctagagatctgtggaaatttgaacttgagagagataatttagggtatctggtggaagaaatttctaagcagcaaagcattcaagaaaactcaaaacagaaaacattggaaaatttgcagcctgacaatgcaatagaaaaaaataaaaccattttctggagagaaattcaagaccattgcaaaaatttacataagtaatgagaagccaaatgttaatcaccaaaacaatggggaaaatgtctccaaggcatgtcagagaccttcacagcagcccctcccatcacaggcctggaggcctaggagaaaaaaatggtttaatgggcctggcccagggcccccctgctctgtgcagcctcaggacatggtgccctgtgtcccaactgctttagctccagcttttacatggtgtggagcctgtgggtacatagaagttaataattgagatttgggaacctccacctagatttcagaggatgtatggaaatgcctggatgtacaggcagaagtttgctacagcagtggagccctcatggagaacctctgctagggtagtatggaaggaaaatgttgaattggaacccacacagtctccactagggcactgcctagtggagctgtaggaagaggaccactgtcctctagaccccagaattgtagatccactgacagcttgcaccgtgcacctggaaaagcaacagacacccaataccagcccatgaaagcagctgagacagggttgtaccctacaaagccacagagtcagagctgtccaaggctgtgggagcccaagtcttacatcagcatgacatggatgtgaaatgtggagtcaaaggagatcattttggaactttaaggtttaatgactgacataatggattttggagttgcatggggcctgtacctcctttgttttggccaatttctcctatttggaatgcaatgcctgtaccctcattgtatctaggaagtaactaacttgcttttgattttacaggctcataggcagaagggacttgccttgtctcagatgaaaatttggacttggacttttgggttaatactggaataggttaagactttgggggactgttggaagggcatgattgtgttttgaaatgtgagaacatgagatctgggagggggcaggggcagaatgttatagtttggctgtgtccccacccaaatctaatcttgacttatagttcccataatccccatgtgtcatgggagggtcctggtgggaagtaattggatcatagggacagtttcccccatgctgttctcatgatagtgagttctcactagatctgatgattttataagattcaggtatttccccttcttgcactctttctctctcctgccgccctgagaagaggtgccttccgctatgattgtaagtttcctgaggcctccccagccatgtggaactgtgagtcaattaaatctcttctctttataaattacccagtcttgggtatttcttcatagcagtgtgagaatggataatacacagcctttatattggaacaagtggtttggagagagaaatatgttagacctagaactattaatgaggcatagcccagacttggatttatgtcttccaattcccaatcccataatccttccaaaacacaagcactatcctatggtagagtagctactgcgacgtgtaagacgttcctatcatatgtttaagctgaaagattatctgccagcattgttgtagaaaggattattttcttaaagtctggatttcctccaattctgaaggcctgtcattttcctatgtattacttcattaatccactgggatgaacccttcaattcagtctttgtttttttttttaaggtcaaagaaataacactggttctaaatgaaacctttaagcattttgaatagaggccaattttctcaataagtgaagacaagataagcttataggctttcaaaattgtttcaatttcaaacaagccttctaaagtaaaatttaaaaatatattgttaccatatcttctactcataagaacttagttttttcaaataagctatgaggtttaaagagaaactccaaaagtcttctccatgtaaaaaaggatatttttaaatctctagaacacaaaccttcagatcaaagggcattgaaaatagtgagttcggatgactctgcccaagcgacagagcagttcaccccacaaaggaacccactccctctctccttctctcttactgctgtttcttaccactttgccttgcctgttcttgtcactcccaggctttgcttaatttacagcttatatcactgtcctctccatatatcagaagccacttgaccacatctggaagtgcaactgtggcccaagaatccacaaggcaatgatttcaggactctgggtattaatgtacatctgagcaccaaatcacctggggatttaaatgcagattctccttcagtaggtttggggtagagcccccaattctgcatttttatactattaggggatgtccatgatgccggcccttggaccacactttgaggagcaagtctctccctaacggtctgggtctaggtatcaactcacccttgctaagagttggctctgaccttgtatgtccccaaaagatatttttcccttattcttgacctcttagcattttggaacaattataagacatcttcaaaggagtagcacaatttttgttacccttttttttggcttataaatatcttttgctaatttcaaaaaatgttttaaaattatatttttgtgttttattctttggttttcttttcctagctttccagaattgacatggttctgtgaagtcattttagtttcagagagtaattattatcaagaaaatctgagaggttttaaattttttttactttactttaaaattatttccttttcatcccaacaatattggaatgtgaaaaaattacataaaataaaattgatgatatactttaccaccaaaaagttgaataaaactttttccttcaaaaaaaaaaggaaacaaatacatcacatcttttgatcacaatgttataaggctgtcatattttttaccacaatgttataagactgaaaattaacaaaaaagcataggctaaataaatgtatccactggagactttcaaatgcatttttctaattaaaatttgagttgaggccaaacgcggtggctcacgcctgtaatcccagcactttgggaggctgaggcaggctgatcacctgaggtcaggagttcgagaccagcctggtcaaaatggcaaaaccccgtctctactaaaaatacaaaaattagccgggcgtggtggtgtgcgcctgtaatcccagctacttgggaggttgaggcaggagaattgtttgaacccgggaggtgcaagttgcagtgagctgaggttgtgccattgtactccagcctgggcaataagagtgaaactccatctcaaaataaataagtaaataaattgagttgaaggtgaaatcaaatgtgaaattttagattatttagaaataggataacaataagtttataccacataccctatcaaaaccaatgggataaaaaccaaataattatttagtggaaaattgatagtcttctgtgcattttatcaggacaaaaagattgaaaataagtagattatttacctcaagaaactggacaaggggcataaaaatagacccaatgtaagcagaaaaaacttaaccaagaaaaatgaaaaagtagccaaaaagaatatatgaaaaagaggacttggccactaaaataaagagctgcacggtaagagtagggtccacgcctctcagcccctgtggtatcttgggcctcgatgcttcccaggctgccattctctcgccatggctacaggcataacacgggtgatgctggccaatagcttcaccctactgagacttaattttctcatctggctagtggctacctgtctcacggtctgtttttaatataatgcaatatgatggatattaaaatgctttacaaactcaatactcttaagtaaacataaggttttgccataaatattaggagatgaaaggaagaagacaagaaggaataacttggagaaactcatttcagggataaatacagcaacatttcctatttaacaagtgactgggagatagtacaagctttgcacattctatgccctttttcacctttgttgtcttcccttcacctttaactcctgcatcaaggaaagcaggtagatatgtgcttgctattcctagtaatctaaacttagacaattctcagtaatgtcacaattaagctaccagacttacatgagtgagtttggtatctggtatttactcactcaattgctagttatctattgagatcctatactgagcaaagcactgaccatgggtatgaggaacacaagactgaataaagcaggcctaggcctcaagcagctttatgtctcctaacagagataagatatatacaaagacatctaaaactggtagaatagtgggtgataacaaaggaattctcaaagggagtaatttctttaaggctagaaaagctgggacagggatgaggaatgttttcctgaaagtggcagaggcatttgggtcttgagagatgagaaaaatttgggagtgcaggttcatgggtagggacttcagtaagagcaaagggagagaggcaggtgattgcggggcatatctgagaaacatgcactttaccagcacacttggactttaatccattatagatagggaataaatacacatgaattaatttaaaaattttttgaatacaaaacttaataggaganaacaactaataaactctatgcttaattgtcaaactattataagcactaaggtatttatcttgcatgttttgttaggcctagtatacataaaattagaaatataaaatatctagtatgtctaccctctgctggcaaagtatttcttcattttctttcccaataaaaataaaatctgatcattctgtttccatctctgctggaaaaacaagcaatccttaaatgcaactcttactttacatgtccaagatcttagatttaaattggacatatgaggccctgcagcaatgatgaatggactcaactacatacatctgggtccatgcggagtgggtcatgctcaaaaatatctaggacctaaaataaataaaggactctgaaagaaatcaggaggtggcctacaaaaaataatgataagagcatctgactcatgtttgtgcacaacactgcctttcagtgtttgtacagtgagatttcagtggtgggtaagagcccaaaggattgactgcagggactcatttacacaattttggataagaactagaaccaacactttttgatagtatctaaaagaactgttttgaaaaaccacaaagaggcacacggttaaattcaagttaattggcaagcaaagaaatttaggaaacagcatgaggagatctatgcttcttggggaaaaataaagattctgctggcaagtaaattatttccagagagatcaattttcagagaacaattaagtctttttgtttaacacagtaccatttatactgttctccatgacttccacttctggaccccctcagaaagcattagtgctactaaatatactatgtctatttacttgttgatatgatcaaacttcaatatgtggttgtaaattatgtaagaaaaaacgtgcaatactgggagtcagaagacataggatctatctggtcacagttcagacactttgctagtttgatgactgatgcaatttaaatgcattgcctcgtccattgctttctcctcactaaattgaggaaggtagtctgtttagtggttttcaaataggggtatataagacaatccaaggaagggggaagaaaacgtaagatcatcataattttaattagcacttttgtatattctaacataatataattacccttgtgggcaaaaaaatgaaaattaatatataagcatgtgttacataataaatctatttgttgccaataagggtcaagaaactctggcaagcattgctctagatgacctctcagcaccttccaattataaatgtctgtaatataaatggttcagtttttactttgcttcaaggtctgcatacttgggattgaagaattgcatggggtttaacagcttcacttgacttcctgtcaactagattacccagtgtctccctcttgacctctatctcctcaagagctaggttcctgacctgctgtcttatcgctgacccacagcagtgtccagcacatgtcaggtactcaaatacacatctgtcaaaggaatgaaattctacttcaagaaatgtttatgtgctttgaaaagagaacacaaggagattaatcctaattctcacttacgaataaatgtttatatgaatttattcctggcagggtccgttgtcttctaatatttaaattttcttattcaagagtatgtcacctacagcctctgcttctgataacattactccagaattcttttctcattaaaagttgatgaagccgtcagatacagaagtagaaaataagtgtctgtcacatgaagcatgctctaccttgacattaaatgcagacttgaagagtttctaagactacagaatactgcatttttggacaggaatattgattatatcaccagaacacagaaagagaatgaataagaaagaaaaagaaatgtgtcttgcactcagatggtcctctgaggggtttaagaggttgatgggttattcttccatgccacacttttatttatttttgatctagtaaaaagagacatttctgacaggtttcctacaaccactgaaagtgaacctggaactgagaagtcaaagatttaacaaaatggaaaactccttcaggcaatatgaaagtatccaactttccaaagagtacaattaccatctagttcaccatatttggcaactccatagttggcagattaataatgcatctgtggaatataagaacatcaatatagaaaacagcatgaatctatgttattatttctgattcctccaatgctgagtatatagatatgcacttaagtgttacttcaaatctatgttgccaggtttagaaatttttgtttaaaaatatcctctatgtaaattcttcataacatagtaatgagtacttatgcaaattatcttgaggtctggagaagaaggaaagacctattttgcttagatccctggcatggcgcctcaagttttggtgttcattaggcttaccctccttaccctggtttctttctagttcccatttccttggagtcagctaacacatttacatcaatgttgcctaaatctgtgatcagcaatctcaccccagaagtccaggccagttgcccactgtacttttccatgtggatattctacccttgtgtggaattctgaaggtcctggaatgaactgattattgtgtctccttttggcgcatgtattcactcacttgtattctccattttggtgaaatcaaccactgacccaacagacataaaaaacccgggaattatctttgactcatttttcttctgcatccacatgttatttgtgccatcttctgacaattttctacatgcctatgcagaatatgggttcttgggaaataattttacctttttctctatgactcctggcaccatgaagagttgttaaataatgactgaaaacatttacaatgaagaaaggaggggtaaatttgtccactgctttagctatatgtgcaggttgtttgaatattgaaatgaagagctatttggttcaaggaagtgcaggtgtgagttaatgagttattatgcgagaagacatactttacacctgtgtttattgagatggcatcattgcatgtttgtctttggttcagtgtgctggttaactaatccccttgagaattgtaggcactatttctgcagcttgaacgcctaatattttgagcctcagggttttgtttttttttttccagcttggaaaacactcacttcacctcatttgttggtgaattgttggttaagttggattcacctggttctgtcaatataaagcaaaccagttttaaggtaagagatgttggctaatgacacgtatttggaagctaaaactggccagatttgttttgagaaacaattcaaacgaagtcccctcctggagatttgttttatttactgagctccagaaatgcatttcccatccagtcatgcagtgcatcagtggcaagccaaatggaacacattcacctctgagctaaaagccttcttaagagtttgaaaacaatttttgcccaagtgagaaatgatgagatgagaagtaataagccaacttacttactcagacaagtgaaatctcaacatgtccagtaatagtcatttcatttggaaatctctcctccttatctattgcaaaatagactttctcaagttccccttttccctcactgcttactctacaaaagcctttcaagaactgacttgacaaatacatagcacctgagttccaagtgcagcttttcctatcatggcaatgtaattaggcccttgtgatttgaggccaataggagaacaggcttaggggaagggattgagatgatttaactgtttgtgttgtaaacacaacttgcatgtgctgagcacttctttctttcagacatcttggtcaattccttaatgaataggccagagtgttacttgtttttaacttcccacactttcattttttttaagattcatttactctctagaatcagattagaaagcccagccccattacttaataatcaggacttctttttcttcatatttctggatgcctgttttcttaaatggaagtcattctaagctgagtaaatagtgttctatactgtttaactttttgtatgagaaaatgagatatgccagtggcactcttccccctcctctgcctccaatgaacataaaattgccctaggaatctaaaaatggaagctgtctttattagagcaatgcctggaagcagggaaatcattagacatggtgtcaatgttgccattagaaatcttactctttgggtgtttaatgacagtccctgaaagtttgcttctggcgaaaacctgacccccaaagtctcagctgggaaacagattataaaaatgaattttcaaacaacctgtccagctgtgcttttcggttatctttataaactggaaagcagcttctatgacaggattcaattccattggagatatgctataaataatactgctgaagtattttcaatattcatttaaaaataatggctcagtaacctaatgacttttagaaaacaggcctctgcacaagaaaaattctacctgatccaaaattaggtagtcgtgtataccaggtacctcacagagagaattccttagggtcatgtatttacccaaaagccacattctgtatgtgtacaatgtccttctattacaaagcaataaattcctttgactttagcagtaaggaaaatagagatgccaattaataggatgacttattccaatcctttagcaagtcagctgaagatccagaagccagagacacatgcctcggtggctgattttgtaagtatggcagacacatccacatatgttctcttctttctatgctctctggatttgtgagaagtccctaatgtccatttctctgtacatactctcatcctctataaagacttctcacttgcattttatattctgcccaatcttcccaaataaatgttttctcaatgcacttgtatatttcaagcagcacagattcagatttctgggtaatagaaacaccagccttcatttgcatgtctaaaagccacttgtttccataaaaccaagttcttgtatgtgactattgaacactggcaggtgcaatttccaagagactgagatgaggtggctgcaaatgtggcccttgaagcaaaagatgatcaaaataaatcaaatgatcatcatcaaattagtaacaactgaaagtgaatgcaggccacgtgttaatgagcaagctgcttacactgaagtgttcatgatgaatctggtaagaagctgaattggaaaggataatgaacactgcaaactgtctttaaaagcttgattctttttgttcgtttatcagtatgcacctggcataagatggtcccaagtatcctagcctagaggctgtgccgtctttgagactgtcttcccttctgatctgtcacaaagttatacaatttcttttgttgaaatacctcatggactattccttcctttgtaccatttagatttctttgtttgcaagtaataaaaacagactctggctagcataatcagaaaggaatttattggaaggaagtgtgatagctcttagaaaggaggcatcatggctgctccagggatctggtggcaggaataaataaatagagggtctcaatagggctctgctattgaggaggtgccagcagttatacagcctcctctctccctcctaaagttttacataccaggggaagagtgtctagttgtcctaccttcagatgtcctaattctctttgtcaggggagggtgggacacgttgattagaagatgttatccattggagttgggggtagtttcctaagaaacattaggatgctattaccagtggaagtgagaatgtgttggggcagccagaaccaacacatgtccaccacattcttctagacagagctgttcctttcatgcctatatgtcttcattttttaacttaataattgggaaaataaggttacagattaatgcaatttatgagatatcatttacttgacgtatggatctgctgtgaaatgtttggaccagaggatgtgtaaaatctgtaggaatattattgggcacagaacacttactaccttataaagtgatctgttattcaggttttgaaacttttttcttttgtgagtgaaaattattcattccactgctcgaacgatatttattttgtgcccacaatgcttcagacattcttttggtgctgacaaagccctcctgaacttgacagtctaacttctgcccattaatcctaattctccatcagctctaattttgtactttagagctacagagaataaatcaaatagtgcagtgcaatctagatgcacatatacaaacaataaccagttagaaactataaagaagttcccatttactgtagcaccccaaaatataaagtagctgctgaaaagatacttaacaagaaatttgtaggtctaatgtgaagacaactgtaaaaatttactgagagccgtaaaataagactcaaataaatggagagtcataacatattcctgggtgggaagacttgatgttataaaaatgccatttctcttcaaattaatctaaaaatttaatgtaccccaattataattccaaaattattttctgtttggaacctgttatttccaagtccatcaggaataataaatacacaggtatagcaaaggaacttttgaatatggggaagaggagtgaaagactgacctactagatattaaaataaaccatgaagctgaaataattgacacagtgaatatcaaacattcggtggaacaatggaaagcccagaacatacagatacacatacacatacatgtatgtgcacatacatagacattttaaataggcaaaagttgatgggtgttaggacaggtgacttatcatctgggaagaaaatcaaatcgctactataccccacacctcatatcaaaacaaattccagttggtttctgatgcaaaaacaaaatcaaacaacttttaaaagaaattatacactatcattaagaaacacttgggttttctatatattttttcttttttattattttttaggctgctaagtttgtggacatatcattcacttgggctttctaaggaggcaatacaattaaccacataaaacttgaaaatgcctatgccaacccctttcccttacccaaacgaacaaaacagaacatagttaaaaggtacaagcacaaattggagaatatttatggcctatatgacagtcaaaaggttaattttcttttattgtttttttcttttttttttttttttggagacagggtatctctttgttgcccagaatagaatgcagtcatgtcatagctcattgcagtcttgaactcctgggctcaagcaatcctcctgcctcagcctccctggtagctagggccacagtgtgtgccaccatgaccagatacttttttttttttagagacagggtctcactatgttgtccagtctggtctggaactcttgggcccaagcaatcctccctgcttggcctcccaaagtgctgggattatagaaatgcatcattggtcctagccaattttctccatagataaagagtaactgaactacaatgtgacaaagataagcatctcaacacgaaaacagttaacaacaacaaaaaagtaacaaagggcataaactggtagttcaccaaagaagaaatacaaacagccaatgacctgtaattaaaaaagcttctccttcataaaaatataataaatgtaaaccggaagaaaatggaacttgattatcaaattagcagtgattaataagatttggggtggtgaagacgtgagtgaatgagcttgctttcagattgctggtgggagtgcaaggggatacaaattttctaaaagacaatttggacaaatttgtccaaaaatttaaattttagtctttttattaaaccagacattttattttcaggcagttacataaataaaaatttatatctctagctatacagattatcattgcagtaataataagaatattaaaacctgtaaataatcaaaaggttgttacaataaattatggcaagttcatatgatggagtattcaatgttttggaaaacattcactataaattttttaatgctccattcatggcatttttttcattataaattgttgaatgaaaaaagcaagttacttaagaaatatatagatatatgcatgcacgagtatatttaggtaggcatatttaagtgtatatgtgtgtgtataattatatatatatagttagcttgacacagccaaatattaacaattgttattaacatgcaataagaatataagtgattctaaatttatttccttctgtaaatctgcattttctaaattttctacagtgagtatggattaccttgggtgtacgaaaaaaataaaatatatttaaaaacagatgtgctttgtttaaagtagcagaacattttttttcaaatagaattgtatgtgatatcccaatttctgaaaccaataaaaggggtgaagtatgggtaggcggccgagagccctgctcactagacggatgttcttgagggcgcactttgaaaggtcagggcctggggaattctgctgagaaatcattccatgttaataccatctctaggagctacattaagtgttgttagtgaacccatacaaggctccacgattgctggttacctctgtagttactcataaactatttaatagctctttccattttagtttactgtattcattgttgtctattcatgcagaaatcatttttttaagttttctagatttttagatttgtatcatattagtttacctgtgcattagaactaaaatgattttattattacatggaaataattacagaattataatttgaggccacaccctcaggttttattgaaagttgatatgagaaatgaccatatgaagaatgaacctccattttccctaaaattattattaaatacactgtccattctggtgttcaaaggcccttatatatagatgcatgtgataaattcccctaaaattttagtatgaaaaataaagtttgcccactttgataagcatgacttaaaaaaaaataatgctgtattattcctgtataactcatcatgttccccttttggctttgactgccagaaagctcagagctatatttattgccaaaccacagcaatgaacagtggcctaattttgcagaaaaattctgtcccagagcacttgagtgtttaccctcaactaaatggtcctgtgatgtgcatggcttatgttatgagttgtcacaaatccaatctggaaataggcaaggattaaataataaacaaacaaacacataagtaatttggactaagcggtcttggtctttggcaatagaaaatgctcacacctagaatttggtttgtagcaaatgtctgttaggcacattgcctaaatctagtgtactactcgggggtgagtctgcccctcggtacagccatggacacttggatctttctgttactggggttcacacccatattcacccatcccatgatgctggctccttagaaggtggtctgtatggcagctcagtaaggatatcaggttgaaagggtgtgaaagagcaaggatcaagcaaactagcaatttgttcagtttcccatggatcttagcctttaatgtagttgatagaagaagatcttgctgaaatggacaaggaaatagacaatttttacacaaattgacaattcttaggcaatggtgtgtgtgtgtgtgtgtgtgtgtgtgcgcgtgtgtttattataacatccaacagtagattaaaaaatattaggtgagttaagatacttccttacctttctagaaggtcaaatattttttcttattattaatactacttggatcattttataagttaaacttgaatagaatacagaatgtggaagaaagggaactaatgttttttgaatgactgtgatgtaaatgatttgcctacattatttcactgaagggacatggctactgttttcttctgaaatgcataagctttccagctacctccttaataaagtggcaatgcactaaaataacagaatttgtattgaaataatttagatacaaaggcctggtagggtggaatccagtaatgtagtcttgattatagtgtcataagaactggtgggtggctttctgtattggcagcaaacacccttgaagccaacgggaatagcttggactgtgtggttctgcagtaagttgggccagctgattaaagcaataggttctcattactaaaaagatttgccatggcattcacaggagagccaagaccagccaaggagcaactgaaccaggcagttgcctggggctccaactacttccttcctacctacccttagaggtccgcttgatgtttcacagatggagtttcatttgaggtagaaatgcgtggtcccccagaacccaggctctaaaattgaatttcctggttttaaatcccagctccatcacttactgttggctgagtaaactgggcatagtcttttacttttgaatctttctatcgattaatgaaatcacctatgaaagacagctggccagcatctggctcatggtacaccctcaatatatgtcaacttttattattatttattatttagacttaaagtatcacctattaaaatgcaaacaccgagggaggtataccttgctaccagttacgaaggattcttaccattcgaatgtccgttaagatgtaatgagcagaaagggatccaggattgaaacctgggagaagcagggaacgtggcttgaggagagaaagagcattaacattttgctggaagccatggagattcttctgcatggaaaagcacccaattgttgcagtaacccaagcacaaatcctcatggttgcagaaaggcaacctaattgctcaatccagatcctaggatctgcagcccttgggtctaacgaactgccccctttctatcaactgttccaccttagaggactctctctatagactttctgtggtaagagacattaaactgtacagccaccacatttgctgtttgttttcctacctgccatggaacatatgtgaagatctcaaccaccgacgtgtatggagatgtacctaccctagagagcctgctaacattgaaacctactgttaagagccactgaaagccaccacccttctctacaaagcagttgtgggtatcctttcacactctcaatgaagacttccatttgaaaatcatccatcacactataaatcagtctcttcaacacgcctcctgtccagccaggagaagagaggaaagcatttaggagatgttccattaagctgtttggtacaaaatggatgaattactattattttttctctccagcgtacccaagagaggctgattctgacccaaaccattcacatgcactatttaagagagacttcatttcacctcctgctaggtcagggaggggcacacaccagagccacacacatattcacacatccagttggctgtgcagcatgaagcactgacctgttaggccggcagcctcggcagacaggaaggcactccaagaaagcaggaaaaacaggccggtttccagcatcgggaactcacacagcttggtaaatttggtcaagtgaggaagataagttaagggaaacaacaacagcttttacagctacatctccttcttggctgagaataaaaactgatctggtgatgatagctctagagcaaagtaaaagaactgatattcagacctgactggaaggccataattctcactgggacctactttgaaggccagcacgagttccatgcttcaccgggggctgaacgtgcctgtaaaaattcaaacctgtgttcagattaaaaaggtgtcttcctaagactataaattcagctcactgtgggcctagcctcatcccttgggatgcacccctcaggaaaggtgtagcaggcacggaaaaacaaagccaaggagagtgtagggggatgagatgctgcaagtatgtcagtaccaaggagcgctgctccctcgggagtgcagtctgtgggcagacgacctggtagagtcttctctcctggggatggaagtaggatcagaagaagaagttacattcagtgacagggaagctgtccatgccctcttggtataagtaggataaggagaaggtatgttatttataggttccattattaatgaaccattattattggttcattttgacaaggatgacacttggtcaatggtctataaattgcaaatagaacaaagggatagtagtgattcaagttgggcagagaatggatcatgcggagatgattaggagtacgtgatcgatgggaaagggttaggttgcaattgtgtcaatattaggcacaaaatgccctgacaaataaggagatgtgatcgtgttgcatttttatactgctacaacaaaatctaaagaaaatttcacactaagagacatttagcaggggagcagggagcaaaagtgtgacctctggaaaagaacattttattctgattcttgactctgccagtgactggctgtgtgatttctcagcagtatattaacctctctgagcctcatttctattctacatgaattgacaatgagaataatacctgatcctacatgaaagtaaaatgtgctgaagtatggtaaacatgttttgtaaagttttagaaagcacaaaggcagaataatatcatggtggggagtgtagcatttggaagccaattctacctggattaaaattcacagtattcacttggacacatctcttgaccactgtgtgcctgagttttcctgtctgaaaatgagaataataataccacctacctcagaggtctgtaaactagttaatatatgttaagtactcagaacagtgcctggcatgtaacaagtgatatgcaacttgtctactgtggtctaaattaatttttggttttttttggtaaaacatctttttgggaaatagaatcagtaaggatctggaagcaattctttatctgctgtaaagaatgggctgccctgagatccttttacaatattcccttttgttacttagagggaagtctttgtttctagtgaggtctgttctcctgaattccctcttctagtttgttttaaagagaatgttcagggcaggtgagtaacaaaacagcaatcagctatctaacattcttttctttcaatctcctccagaaactagttcagctctgggtctgcagagctcaggggcctacaacccgaggagacagcctcagaatgaaatgggtaggtggttaggaaggtgaggaggacaacagtaagcatttatctccttcatagcctgtgtctgtagagcctgttgaagaccaccaaatactgcacgatcaatgtcaccactgttaccgagcctgtttcttccgtctctacaccctttctttcagatctgatgcaatcttatgccagacttccaatctccaggaattttttcttcccttatcaacctgttcacatatgttacaccttcccctcacatcaggtagagaagaattctgattttagtttctccacttagcgtagcctccagagcccaaaagcctgggtttgaatcctggccctgaaatgtcctagttgtttggccttagccaagttgtttaactttaattgtctcagtttccttagctgtaaaattgggatagtaacagtatctaccttccagtgttcttgtaaaacttatctgatgatccatgcaaaacacttagggcaatggctggcacacagtaacgttttcaataaatgttagatgatgtgattattaccatgctcactattactgatatatgatcctgagtgagctacgtatcctccttgagcctcagtttcctcgggtgtaaggtgaggaggacaataacttgttttacagggttgattcaaatgaggagatgcatagaaaggctctggcacatgctagacactcacaaaatgttcctatccttgttgctgttactcactctaaacaacacctggcctccacacagctccaactaagaattaagaggcaatagggagcagtgaagagagcatgttcggcctcttgattctcactctccgggtttacttgctggctgcatgaccttgggcaacagcttaccctttctaagcttcacatccaataaaaatagcatctggtgataggatcattgtgaaggttagatgagacactcatggaaaacacgtcgtaggcagcctgtcatagcataagtactgggtaggtcattttttcttgttggaaaccagcactacctcttctgactgactttatttctgtcaatggagatgccattttacaaggttctcaggatgaaactttggagtagcctttgactgtctccttttctttatctccaatagccagccaatcactaagtcttagagatttttccttttaaatatcagtccccttcctgatgcttcccccgcagttcatcatcacagtttcccttgattctagtctccttcctctgattcatcctttgttccagttcctcatctatattttaaaaacaggactgtcagtgtgtcactctcctgagcagaaacctttggcagctaattgtggactagagaaagaggctcagactctttgaaataccacttcaagatattccacaagctgactccatccctcctgagtcccctcatcctccatttctcactagctggagccctctggtcctcccaggcatgtcttccagatgccacattggtcccactgccataccttagtgaatgctagtcttcgcctcctgaatcaccgactgctcagcctttgcccctattctatcttccaggccatgcccaaaacccactctgcttataaatactgcttttcaaattattttccagaatcataaagttggccaagggtattatactattccagacacaacagccttgtcccagtttgagtgtttacagtgtgataacttcgatgcggctctggcactcactttctatcccagtcttaatgtagagctcatctttctaagcctgtcactcactgagggcagggtccttgttttacacatctcctgactcttcttagatacccccagtagaatgaagcattttagcagctgctcagtgaatgtctgggcaagaccccatagaaaaaggcccccaatattttgccttctctttgcctggggccttcacccctctggcacacttcttccttctccttcccctgaggtctttggccctagatcttctgttctacctctcttctgtggctccacctaacccttatacttgacattggccttctggccttcctcctctactccagcttacttttgccctatctgaatgttctaagtgagcagcccaccagaccagcttctttctttggctcagattctctagaaactccatctatcatcccaacttcctaacaacaacaaaaaggaatcaaatgacatgattgctcaggtatggcacacatatcatttcagcattgcttgcaggttcccttctataaagtagctgtggatgcttgtttagacccacagtgacctctggcttgagctaccctgtaagctagtgattgaataagcctgaaaaagaggcagatcatacccaatttatcacccttaatcaattgtcttattcttgaccctggatcttcagttcttcctcttgaccctagtaaggccaatcctgatggttcccgttcactagttttcctaggtgatatttatttaaggctgttgatgtcctaggatcagatagtgtcaatagcattagaactgaccttgggcaagaagagagcttgggcccctctgccactggtaccaacctatgcctccaggggtgactgagaaccaagatggcaccagtggtgccgtatgaaacttggaccagactatctagccttttatgggcctggaggttgtccatcatcagaaatattccatggatactgactgttcttgacagtcccagctttccacatacagacaaaggatatcagtgctgtgatgatggcatacgcagaccccattgcaaatgagccagcgaagattcccaggaaattccccacagactggaagaatgctgcggcatcaaatgcatttggattctccttgggactgtaaatggatatagaactgaaaagagaagagggtggaggttagttagtgactttcatctcatagcccagataggatttcgcacccactttggggagaggtatctttccctgtaatgttgggtgctggttggaagagttaggggaaaacagatacagaaggggagagttggagaatgcagaaatctttctgcttccttatagccccatcccatgggatctatatattgctgccagtcagtaaacatttttatattggaagggtcataaagaatattgtttctgagcaaactaggcattaaaacatggtaggtgtataaggaatctgctgagaagatagataactgtgaattatttagtggccatatgtcttcagtgctgttatatattcacagatgttcctgataaaaagtgcacttttatggcctgtgcacaaatgggtgatacaaatcaccgtgtgcacaaaatattctgccatgatcttgtcataaaccacaaagcattcctcctctccagtgtaacccttcagaaacagagcactgatggtgctcagaacatcacagtactaacccccatggagagacaaaaccctcattttcccaccaaaacaaatggcaacagctgcccaaggtcatcttttataccccaattctggcggctgccaacagatttatttccatagagaaaaatcaatccaccaataggcagtctgttcacttaaatattattgaggatgtcatataagctattttttttaaaaccagggcctcagatcccagagtgtgaatatgaaggataaggcatgtcctattttaggaaatatgaactccatattgagcattaaaatgaacatatgtgctagatccactagctttagggagactaatgaaatgacatttcagatttttttttgcagttttttattttaatacaggattttaaaaactaatcaggaaaaatcaagagtttagcagtgggttttggaagaaactccaaaagtagcagtgtggagagcaaaagtacactagacacattgactgagattagattggattttacagagatgtaactgaatcttttatcttgccaatgattagagcatgttagctctctgacctgacttttggtatccagagatgacttaagagagagcaaggggaaccaactccaatgcttctacaggaagatgtgtggcatcaaaaaaggtagttttaaatggtcttagttttttcctggatgtctttaaacccccaaagtaggccaaacacttctgctttgatcctgtaattggataaggaagatgaatgtggatcttgaatgaagccttgaaatgtatgcgagaaaaggactgcctttgaagtgtttttcttttttgtaaagtgttgtgctttgcaggaaaaaaggaaaagtaaacccacatctgggtcctttgtatctgcaagtcctgggaaaaggtataaaactccactggttgttaggaaacctggtgcccaaggctgtgatgcttgatgtgtttgagttgacattctccagcatgtttcttccttccagtgaagaaacaagagtgatgagaaagcattccatttgcattctgcccttcagacaaaggtttttgcacagtagcacagctttagaagtaattctattaacctgtggttgccactagtagatctgacccatagaacaagcacggctttatccttctctccacctccataacttccagaagtgtttccctggcctggtgcttctggaattctgagcgctcccatcacatcatttggccataccctgtaccattatttatgtacgtttttctttaaatcatttttattcaaattcaggagattttattaaagaatatctatgaaatcataagttcgatgtgctaattatatttctttttaatatatgtaaaaataggtaatttagaaaaagaaagttcacctgtatgtcacctaaaatcatctgggtgtgcccactgatctgtagtctgcactttgggaaatgttctcttccttcccactcaacagggtatgatcactttgttcgccaaactttgtacccttcctgtgatatttgacttaactgaagggaaaggcttaattatccttgacctatggagattgtccattgaatttgctggccctaaagctccacagacatatgcactaggtgcctgccatgtgacaagtgacatatttaataggtataggaagtgggaggcaggcagggaagagcatagagaagggaagcaggatttgatccaataaacatcttatcaaacacctgatatatgcaaagcataactcggcagggaagcctaaaatgtaaatgacaaatagctgtagtcccagtgttaagtgtgattttgtgagaaatacacaacatttaacggtacaaaggggaaaaggggtactattttagaataaaggaggtggcatttgagcaaggtagcatgtcatcagacagagatggggagagagtattccaggcagtggaaagagtgtaaagaaaggcaaggaggcaggtgagttcagggcaattgcaagacatggctgcacctatgtgggcacgtgtggtggggtaaagatgggtgaggcagcattactcagaaccttaagttccatggtgagaatatactaaatacctcacatttacataatatttagccctcttgtgcctacagtatagctttatttgatcctataatagctctgtgaagtaagcaaggcatgttttgttctctctccttatccctttctctctccttccttccttccttctttcctaccttccctccctcccttccttccttctttccctccttttgtctttccttcctttctctttctttctttgcataaaagacataaactaaaaatcagagaaactaagatcacacagctactaagttcacaatgtagatttcttgtttctccctttaaaaaggcgatcatgttgtggggaaacataaacccacatcaggatagttgagtgacagtgtgatgctaactataaggacaacaggagttcaggtactagaacatttattttcatgcccgggatggaacatgggcagcaccttcctgtatacaagcataagagcggagtatgttgactagggcaacagcaccgtctctcctggcccaccagcaggtgagactcagaacttctcaggaaatcctgctttcctgcctggcttttctgaggctggactcggtcttgcttctctttggatgcccaggacacagcctgttgtttggcacatggcagggtataaaaaggctgacggaatgaaggtgcgggacaactggaaaggagaaaggaataaagaaagaaaagcatgaaggaaggaggcttgcaaaagctcgttatctcttgaagcaaatcaccacccacaagattttttagcagacattgactatgcacagtcatattgtgggtacttttatgggtatcaatctaatcttgaaactgacacctgtgcctcttaatttgagcccaagatctgatacttattggctatatggccttgggcaagttactgcatattcagaatcatttacctcatctgtaaaatggagataataatagtatttatcccctagaaatgttgtgaggatatgagatacatttaaaactcttagatatatcttgtggattaagtcgttccttgagtacttatatgtacactcaaatactcagtgaatgttatttatcctcaccgtcatcatcatcattctgctgagaacttccacaagtctcacaataacaacagggtggtcagttaccactgtgggcaaatggggtgtgactgccctcagggcacaccaagctctgaggttgctggggctgaactagtcacttttgcataagaacaacagggtgtccaggaaggaaagtaccaggcaggtaccgcagagaaatggccataggagtggggctaaaatgttctcatgtatttcatgcagctcttggctcagtggatcaaggagggaaggagtgccctcagctgtgtgggcaggggtctgctccatggacaagaataggtcaggagactcagcttgagttgcatctcttcaagtttagtggaggatgttctataagcaaagtcctctggcttctagtaagaaatgaggcaaaagaagcagaagccaggctgggcagggtggctcgctcctgtaatcccagcattttgggaggccgaggtgggtggattttgattgcttgagtacaggagtgtgagaccagcccaggcaacatggcaaaaccccatctctaaaaaaagtacagaaattagctgggtgtgatggtacttgcctgtagtcccggctactcaggaggctgaggtgggacggttgcttgagcagggaaggttgaggctgtagtgagctgtgattgggccactgcaccctagcctgggtgacagagcaagaccttgtctcaaaataaataaataaaaatatatataaattaaaatttaaaaataaataaattggaaataagtccaggatattgattcattctgttcaacaatagattattcagcaaaattagtttgatgacagtgtattggacctatactcaaaaataaatgtgtgcagcatcttttattcaaaaattttgaaatgtatgaagtatcctaaattctttgatgaaagcaacatgaataaggatcattttgcttactgtatcatttcactttcacagacattattgagacttcagtgtttctctacaactcatcttttcttctatatgatgctcctgcaaggaatgggtctgatagcttaggcagtgttaagagcatagaatctgaatctgagttctgggtgtaagtctcagcttactgccacttactgcctatgtgaacttgagcaagttattgaaaccacttttatctcagtttctataaaatgatgatgacaataatagtaccaaccacactgggttgctatgagaattaaatggattaatgtttataaagcatttgaaatggtgtgtctcacccagtaagaactagataagcatttcttaaataaatcacctctctctctgagtgcttcatttagttctaaaagaagcatttcaaacaaatgttcaatcaaaacttctatccaaacagaactaagattttaccacctgtctctcccactctgactgtcccaggcctaccatctttgggtggcagggatcatctgatcatatgaatttgttttgtgcagaatggtgtgtggcacatagtaaagtgctcaataaatgctagtaatgaagaagaaggaggagggggagaagaaggaagaaaaagaggaggaagaagagatgttgtgagtgaaatgctgctgatagtgaacataaaataataggtatgaaaaatattatatagatggcaccacaacaatgccctcccctctgtggctctggctgcccttccactgtggccttacggagtcatctctctcctgatcacgacactcttcctcaaggtctcctagtttccaacaccaccttcccctgttattctttactggggctgctgagacactttgccgcacagttacccacagaaactacccagccacctcaagctcctggcggccctggttccacaggatgctctccctgaccggtcctctcaaatcccacagcctactcaccctcctgggtgcccatgccaattagaacagcccgcttctccagcctcagtccagcctcactccctttgttaacatgaaatcaatgtcgcttgaaagcttatgaaaagaacatatgaagtgaacatattgtatctcttgcaggatttctattaatttagtcattacagaaaaaatgagaaaatgattactgtagccaaagatatacaaaagaaccttccattttctctgccaaatatgtaatccctaacaaaaaaattattggcaccagttcattgaaaagttcttgattagttggaacatacataaatatgaaatggatcttttttccaatcactgcttccagctgtactatatcaaatccccctttgtgctgggtaagtagttccattaatgatatcttggtcaaatcccattactgagttcctttcagttattaaaacttagcgcagcccaacttaaaacctaaatcttcaaaggtggattcctgttgtccctgtagaatattctagagcagcagcaggatgactggaaaggagggaaggcagcatgctcctcctcctcacacctggtgccagtgtctgctggtgatggaagcctggaggagggctggggagcccagctctcctctttatgggcgtaactgcttgtcagcggtgtgtagggtcccggcctggtctcagtctttttgctgctttgtccctgtcttagagacctctgttggcatgatggcacctccattttgctgagaatcccttcacagctgccacaagatcttccaggtctatacacttccagcctatttccttgggttgggtcagtagccacttgggcagctcagtgcctgtcacccctcaggaggtgaaaggaaattccttgtggacaaaggacagacagaactcaaagtcatccctctgagcctcacctgagacaaatgcatatctgattgtttctgccctatagtttatgtaaaaatacagatttcactgagccagactaaattgtatattcagtggaaggctgatcaaggactcaaaagaatgcaaccttttgtctcttacctacctctaacttggaagccccacttccagctctccctctttacaggactgaaccaatgtacatcttacacatactatacactcatgtctccctaaaatgtgtaagagcaagctataccctgaccactgtgggcacatgtcattaggacttcctgagattgtgtcacggttgtgtccttaacctggtcaaagtagactttctaaattgactgagacctgtcacagatattttgggctaacatcgccaatctccttaatctggggttcccctgagtaccttccatgggccatagaacactgggctgggtgggcttaccccacatactctcaaggcacatcaaacccaagagccttcaggttctgctcatgctgactcctgctttcagaaatctttaggccagaagaggtgctggtctctgtgttttgtgtgagcccacactctgagggccatgtccaataactcccttcccttgctctgctttgagagggctttggctccactgcaggttctacactgtgggatgagctcgcagcctctgtccttgcaggtggcaccagcctttccaggtgattccagtagactccccttccccttggcttagggaagaggaagaactttcatgggaagggataacagtataacagtttacacctcaaacactgcactctccccagggataacccctttccttccccaccccgtcatacacagatgtgaggcaaaggggatggggtgggggcgggggaaatgaggctgcttctgatgccagttaagccagctgaggggtgagcatcctaactgctggggagacttgctgctctttttagtatgaaaccatttagcaacttctgttttcagccatggttcctaaccccaatctggtaaacaggaaaagatccacaagatcatcatgtgacatttatgtgggagtgcttctagtttcttttctccacatctacagctgccttgtcattctgcttttaaagacacattttaaggaccaacacaacataaaggggcaacgaaaatgtgtaaaacctgctctgtttttttgggcctgggtgtcacaggtaggaagcaagtagatgaaaaacaattacagtgctattttgtgtttaaaattctttatgccttaaaaaaaagaagtggatccttatctattatttatcttttaataactgtaccaacctgccctttctcagataagttgcttaattatgaataaggaattgatttttatggggccaagaattgtgtgtacacatcggaattcgttctggcatctccctgcccattattctggcttatgttctgccaaaggccaatgaagctctgtcaagagaacctactgtaaaacataatgacttcagaaattgggggcattccaggcaccctgggaggttagaagagctgcttcttaataataagaggtcctggccaaagttcactgagcttgagtaagaaccatagggttttaccttcccaagagccaaagaccctgcagagtcaagagctgtgtttgaggggaaacatcaattaactctttctgcttctgagggaccatttaatgactgctccttaagaatccaaatgtataccagagagtgattttccaaatccttgatgaatatcatcttgtcattttgatgtcaggcacaagagaaaaatacaagaggaattccgtgggaaggataagctagtgtatcatggcttcctcgggaataacgcaatctcaggctgaattaattgattcattccatccacaaatatttattgaacatctactaagtacagacattgttcttagcactgaaggtactgcagggaacaaaacacagctcctgacctcatgttccttacatctcagtggagaagaaaacataataaatagctaagcaaataaatgtgtaattcaatgacaaggattgaaaagaaaaataaaacagcaagagaggatgggacagagaggattgggatggtcagggaaggcttctctgacaaagattattaagtggagtcctgaatgaaataaagggagagctttctaggcaccgaagcaaagcttgttcagtgggtctgagaagccacaaggaggccagcatggctggagggaaatggtggggaggacagtggtgggagtcaggctggagtcaggctggagccgggccagggccatgtcttatagagcctttcgggacattgttaggattttcttctagggtgaaagagcaggcactggagggttggggtagaggacaggggtgtgatggaatattccaggtgaagtctatgttagttacagtggaggaaggtgggtgggagacaacatgatcccatgacactcttcaaaggctgcagcagccaagcctgtcctcatcagcctggatgccaccacctaaacgagacctgacaaataacagcagaccacaggaaataaagtagagtagtgaagaaaaagattgagagaagtatgggagttcaaagtatagattaatttagcagaaacagctgcagtgagcatttgaaaggtggttgtgcagaggaaggactggactcattctttgtatttccagaagacaagatatagtccaaaagtaacgtatcataggaagacagattcccagctttatattatatttcaaaattttctaattcttagatctgatggaaaatgggatgggtactataaaagggtagtgaattctctgtagttggagatgctttaaacatagaataaaagagttacttgccagggtgctgtggaggaaattcatgccctagagagttataatgtggcctcaagggtcctcccaccctgagggtcattgacttgctatctattttccaatttcctccaggcctgccaggaaaggtagtaaggtacttggctttcctgtgctaacccaaatcctgacattggaaatgtctgagcacgcagccagtaaggagcagtacttcaatagaggatgcagatgatttaggttggagccaggttgatgatgacatcaagaacagttacaaatttcagcacagaagaaagcctttgacagattcctaagtggctctggtccattaagttccaacttttaaggtgacaaagaggcctctgagtttaaaattggttaaaagggaagaagagttaaaggaggtttgttatgaattatatgtgcattttctttgaaaagagatcttaaattactttccaatttagcttgaaacatgttgtcagaattgaattagtctgtgggctttgagaaatattctcttatacctaatattgagaggaaagtgaatttgagatagtcctaaagataaaagcaacttgcaaattcacttcttatttctttttctttctttgtatttctctttaaagcagaaataggaatttgaatcccactactgtgggcctattcatttaagaaagagagaataattctcatggcctaatgggaatttctatcctttctccaacttttcaatttctttaatcctcattaatgaaatcttagctccaaagaatgctgtcatatgcgaaattttagtcataatagatataaaaaggtatggaaaagtaggttaatagccaccaaagatggaaatccagctaaagttaaaatataatcataaacaggtgcaagcaagaccaaatattaatccccacggttgaaaatagagaaggaggtcaaattctccaatgtttactgagccctcaaaatacgattccctgtattcatttctatgaagcattcactatgtgtcaagcactatgttaagcatttttataagcattatcttctttaaccctcaaagtaaaccccaaagaaggtgctactattatttccattatagataaggaaattatggcttagatagattaagtaacttttaaaatttcacctcatttaatccttccaattatctaacaaaaaaagtacaaccatgcactgcataatgacatttcaatccacaacagactgcatatacaacagtggtccggtaagattacaatacggtatttttttaatgtctcttctctacgtttagatacagaaatacttaccattgggttataactgcctacaatattagtataataacatactgtacaggtttgtagcctagaagatataggttataccatataacctagctnnnnnnnnnnnnnnnnnnnnnnnnnnnnnnnnnnnnnnnnnnnnnnnnnnnnnnnnnnnnnnnnnnnnnnnnnnnnnnnnnnnnnnnnnnnnnnnnnnnnnnnnnnnnnnnnnnnnnnnnnnnnnnnnnnnnnnnnnnnnnnnnnnnnnnnnnnnnnnnnnnnnnnnnnnntttcttagaatatatccctgtttttaagacatgcatgactgtattgttctcagttcagagataaatagactcagggagattaaatcacttgcccaaggtaacttgcaggtaaatggagcatcattagattcagatctcaccaagggaaagcctgtgactggggagtggaaatgcctggctctaccaccggaatgtgctcacagagaaataactcgaacatacaccccaacttcatagactgaggcaaagtccactcttggaagttgaaaatttcaggatttctagtattaatttgcaagaaaaaaaattacattagttaaaatatctatttcaatatgaggagttttgctgacaacctagggctacttacaggccaagatttcttaatggagacctctcctctatattgaatgggttttaatatgaaactatatcccatatctcctggcattcataccaacaccaacttaggtttgccatcctacgcagtttgtcctgtttttccaagtggtgactactgtctctttagagtaactacttatctgtctcagcatcttcatctggaaaatggtgataacaattgtgtttccttcatagagtggggattaaatatgttaatatgtgtatagtgcttaaaatgttacctacaacatggaaagcactccaaaaatattagctgttattattgctatttgcattagctatatctttcaccatttgctcaaaagaaactaaataaaaactaagctctacttctaataatataaaggcatttgggaattccaactagtgtattagaacattataagaatcttttggggtagaatgaacaataggcttagagtttgatcaaatattgaattcatctttttcttaataagtcctatagagcagaaggctactgggatagtatcaaacaaggggatgcatgtaaattgttaacaatcactaagcatggacgatccatggttttgcaaatctaacaaagctgaacttttagcagcctttcagggaagggtacaccgaggtagatataccacagaaatcctgtggctacacctgaaggaaaatgtgtttgtgaacagagggtgtttaataaagttgtgtagacttgctgattagcaacagtcaaggaaaaaaaaccatgaaaacaacggagtttgctttcatggcaagatcaccaattcacagctcaccacatgctacatagagataaagaagaatcagcatagggcacttgcttagattggagcctgcagcgtttcataaatgctgtgtgctgaggactgtgatgagtggctgaataaaatgctagtttcctctctgggtcaaaggagtcttcatagacaatgggctgccttcttaatctgggtgcctttcattctcacattagataaaccccactcccattataaacagctgcctgagacggcctgagggagtttcacctagtgacaagccaactcctggaaaatatttgcactgatagactcattcccccagacccttccctgatctcccatttattagcaattaagtgagcatctgggcccccatcacagctcaatttaattaagaatctgtatccatcttcttagagttgcagataatttcacttcggttcaagttatctttggaaggaaagcacatagttatcttcttaaactaatgtatttcacaaaggtagttgcctcattcccacagatttcagtgtcatgtgtgaagcatgggaactgcaggccagcaaatcttatcaaaggaagttttgcttctatgtaatattcttaacttatatgtttctaggcgttgccatgaagtgtatattctatagaggagtcctctctggtattagctcttcaggacatggctttatctggaataagaatatggactttaacatatatttgaatctcaagccaatacagcttgtaagaactgatgtattactaactcaagcaattaatagacctgtcttgtccatgcaataaaggtagttactaacacagagtcagaggctagatataaggatgaacagttcatctgtcaaggccatagccatgccatggaggagcacaatatattgcttggtgccaggaactagggccctgcatgctggagcagccttgaagtaccaagaggatggtttttacatatcgagttggacaataggtcagaggcttggggaacatgtagactggaagactacataggcattgggaaggagggaggtcagtggacacttcaagttagaagcaggtaaacaagctatcagtagcatgtgaacaacaagcaagggactcaggaaatcaatattctggaagcctggggatgagtgtaaactgaacatttgtaaatgcatacatgcaattttctggaagaagattccttaaaactttcatcaccttctctatgtggtccatgaccccccaaaaggttaaaaaccactgaagtagtgatctgcaaatactgacagtagaacaaggagggagtgttcaaaagctgaggcaaatggtaactggcagaaagtgagacaagaggaagaattgaataatcagtgcaaggcacatgaaacaagaggaccttggtggctgggcgcagtggctcacgcctgtaatcccagcactttgcagggtggaagtgggaggatcacttaagcccagatgttcaaggctgcagtgagccaagactggtcactgcactctagcctgggtgacagagcaagaccctgtctcaacaacaacaacaaaaaaagtgccttgataatggaagaaaacctgtgccctggaccatgacttttgcactcttccagcatggctgggatcaaacgtggctgctccaggctagcagacaacatatgtgagaacacaattaaattaatgatagatcagaaagactggctgttcctgatgcctaagtatatgtagatagaaaagtgaggttttgagagttgtgtttacatgggagtgactgacagagttgggaagtgtagtgggtaacaccatgaagcatacattaatttatggcctggatctgctctactttctattcatgatgtaaatgatgttaactgtattgattcaatacatcaaaggtcatctggcccggactcaccatccctgccaccatcaccagggctcagctctctccaggtcaaccagaatgtgtgaaacactgcagctcccaggccttggttaagtttacccatggctagatcttcaaaagatccactgtctgcatatacatgtcattaaagcaaacaggagaaacaggcctatgctccctggaacatgggggagaagtgttccttgagggaaaatttatgaaataagtaacaccttggtaatagtaattaaaaaaaaacttggaatgcatattcctttgtctaagatgggttaaaaggagagaattaaaaaaaaatttggaatgcatatgcctttgtctaagatgggttaaaactagagaactgtgcatacggttcataaagaagaaaggacgtaggtaaggtacgggccagaaggaggagttggtacaaggtgtccaaaggtagggctcctcctgggagcacaggtggcagagagtgaggactgctttttgatgctttccctctactccttttatagcaaatctctcattttctctctctgtagtttttattgatcaggttttcttttgtattaccattctcaccatctgatggataagctaccagctagtgggtactgttgtactatactccccaggtggaaccaagggtatatacaaaaggtagaatttaataattatatcccagtgtctcctctggattaagtgtattcattaaacttttattcaaacctattatcaccttcttggaaaatccaattaaaaaatactttagggccattgttaggaaacatgcaaatagaaacagaggtgatccagtgataggagaggagagtgtcatttacataaataaaataaaggactgtggcacctttcagatctactgtgcatgtgtgaaaggaaaagagaaagagggagaggggctgtaaaatttatagtgagaaatagcaaaatccttgtttttattcatgaaaagcctaccttatcacttaatgctaatgaatgtcattaaaaggatgttgatgcataattagagattatagcaccttgacttcatgtgaaatgtgatggtgaagacccaggcaacctcaaccatgggaaaagtatgataaaccccacaaacctaatgccagaatgtggggactataataaaatggagtctcagagaaccagaaaagtacccctgccatcctctgccttggatttgcctgacaatccttggctatgccaccagccagtctgtgttggtggcaatggaggggaaggagggtattggttctgttaaattatttacattaaaatgttcagcccttaaaattctggattttaaaaaaagagcttaattggtaagttcccaaaatgaggagagagaaaaaaaaaatttctggctttgcaaaccataatacagtacgctagcaagatataaaaaggtaatttgttagtaaactgagtgatcaccatgtgcaatcccagcttaattttagagtcttaaatactgaatttggaaagcatatatatctatttcagcaaaatgttcgatgttgaaattctcttggactttgtgctttctacattgcaatgttaatagctgccgtttattgagggcctcttgcaagccagaactgtgatatgtatcttatttacattatttgtaatcctcacaataacctcatagcagagataatattatttacatatcactagaggaaattgaggagtgttaaccaggtggccaaagtcacgtggtgagcaagtggtaggactgacattagaatcctggttgatctggttccaagctcttctgcattttgatgctcccacccagagaactgtatgttgggaagtttgtgcatcaacgaaaggtttgttgtatgtggtggtcccaaacggtaagttcctatcttgggtcctatgtagtccccactggtaaggtctctaaagtatctagtttaacttgtatctgcacattttcttggctctttatttaatattaaaccagaaaaaaaaaatgtggccccaagggctattctgagaaagaagagcctttgaaacagaaatggaaaaggattcgcttccctccagactttcccctatgcacaacaaaatgtttatgtttgaaaggtggaatgtttggcttgttatctgggaggaagtagtatatctgtccttggctgctactaaattgtacagataattaaaacattatttttctatcagaacagaatgtattgccaaatggagattcctttggggacaaaatgatgaaaacctataccaccaaagcagactggagtacatctagacaggatgtcactaagaaatggaacctggaagacttctttttgaatgcatgatttctgtttcaaaagacacaaggatatggggcagtggtttcttgtgacttaagctcatcagcagaggctctgagtggagctagtggatttggccctctttgctgagctgttggggagatcctcccacaaaatcatatttcttttggcttcagagttcagcaaaattgagtatctttttaaatgaaaaattaattatactaagatgtatttcacttcagatggtgatgatccattttctaccaacaatccttatcaagcatctgctgaggctaccttatccagggaaatgctttgacttcttatgaagagaatggtatctcccttctttattgctgcattactttcaacattctctttcctgaatcaggatttaaaccaatacatccttcaatcttgcttaatttagtgaaaacaagattgttagagttgtattcctcttgagtctctcaattaagatcagatacaatgctatgaaaaaactgattagggtgatgtaggtgaagtatagaaatgaggaagtgagagcaagagagagcactggacagaaactacaagactggcagaagcttgtactgactgaaaaattagccatgattggcaggacaaaggatatatgggaataaacgtgggcaataaaacagcaatgaagatttctctgggaagactccttcaagtggtgtttaatccccgatctggcactgttgggtgtacagttgcttggttagtttaaatgaggaacaggtttggcagcagaaaggagggagatgggacctactccttgttgtacaatagattctaatatgctgctttgtcttagtaaaaaaaattaaaataatccctagtggctgggctttgaggggggaatgtttttatgtttcagtcatttttctggaccaggatgagatggagggtttttgcaatatgtttcctatagcctagggcaaaaactttctccgtgggcttctctatgtcgtctgagtgatgagagggaaacaaaccagggtacgacatagtttagtaaagcctggatcacatgaaaatttggtggtaaatacatactctaaagctttagggcccatagctaaagaaaaaaattttggaataactttttaaaagagatttgaaatttgtgagagataaagcagataatataaatcctaatctcttctcaacgtgtgtgtgtgtatgntgtgcgtgcacaaacacacacacactcatacacagagagatacacacacctgggtcatttcatcaggtatcagagttctttggaagtgagtgaaggattttggttttgatggatgttcttgctatactcaaggcttttttatctgtagcctttttgaagttttattatttccataagttaatattgatatcatttttcggtttcctcatagatagatcctgtcgaattgtctggctgtttttatcaaggatatggtctatgggatcattaaaatgatgtgacatcatgcttacagaatattttaaaaactcattaaaaactcaaaatgcagggtttctccctacaatgtatgaagtctttttctttttcttttttttaaagacaggatcttgctgtgtcacccaagctggagtacagtggcatgaatatggctaactatagcctcgacctcctgggctcaagtaatcctcctgcctcatcctcccatgtagttgggatcataggtgtgcatcaccacacctagctaagttttattttttgtagagattgaggtctcactttgttgcccaggctggtcttgaacccctcggctcaagcagtcctcctgccttggtctcccaaagtgctgggattacaggtatgagccaccacacacccagaccttgtatgaggtcttaaacatatgtcacggtaaatctttttttttcttctatgttcctcttcacttaccttcttcatgttcagtaaaaagaaagtgccagaacatatagcatgagccattgtaagatacatggatgtgctttggttaaggaaaaggccgaggcggatatccaggcgagtatgagtcagcaagtttggtgcgcaggcacacacctccacttattatatagcctgttcgtgtaagttcatgcttggcttggagccactattgtctgtaaaaggtataactgtcctgctgactctgtgcacggggcttagctcttggggggctcggctcggctcaacacggcttgacatggtgggcacgctggcgtccagagaaagagagagccaaagctgtccttcttgcagacagacaggagggggccaaaacacagctcaggcttgtttgtgctcaaagagagaaagttaagctgttgaccctgaaggcaagggagaactggcctcgcaaccttgcgtgggggtggccaattcaagcagctgagacagagcggacagcgtaagaaaagctgctcaggagagaggtagtttaagaaagctgttgatgagagctgctgctgaataaaaccatattcacccgcctgtggccccccgagggttctttctgctcatccacccactcccctcggacttcagcatggtgtggacctggaccccaggatctgacagccatgaaagatgttgttaatctcagaatagagttaagaggaaattaaagcttacttttaaactattttacacttactggcaggcaggagccaagtggttcctatagtctcaaatgtagagatttatcaaagctgtaaggaaggtatggcgctaaaaggtgcagaaaactggcttcaattaacattctaatcatcactgtcaacgccattatgcaactctgtgtagagtggcatattcggcactgtggggttaaacataagcagtgggcgctgccttccctagaatcgcagtatcgagagctgttgtcaacagctcaattcggggcctgcagacaaaaggttctgtacccacttaccaattccctgagctctccagtccctggtaaattgcttttgaacacattctcaacttttatctttttttttttaaatgaaaatgttagtgggtaaaatccagtataagggacacattattctgagagcatagctttccctaccgataccagcgtcatttccactgctctgtaataagtagctgcagctgttgccatggcgattttcatttttaaaaactgtatccatacaaagacaggcaacgcagctgtttccatgaagcatcacgaaataagcccagatgtaatggcactcctgtctttttccagaattaaggagatgtgtctaaaagtccaggtagagccaaaggatggggctgtagctgtgccttgagaggagcctcctgctttcacttgaagctcaggacactaatggagggtaaattagtggcgctagtgagcgttcaatttctacccagttttctcaggcagattctttgtaccagtgaatcactatttacactgtgattataacttcctccaatagcctcctttgaaaaagacaccgtcttcctccaaatccgcacatgctaccccggaacattacaagaacaagcactgctgatggggctcagtacttgtttttctgaagtcccgtggcctcctacctacatgttattaaaatgctgcaagcaagcaagtcaacacaagtttttaaaatcattctccactttccagttagaggaagcgtgctgcctgctgctgcccttgtcctttaatatggagggagtttggttttctctgtgtgtggtctggtaggcaccaataaggacaaaaagatacctgtcaagctcaccatttcctgaacaatggtattatctttctcagggaacaggaatcttttgtttgtttctatttttgttttgaggccattgatttgctagccaagccagatgctgaaaattatgtaagtagaacccacaggtcgcctcaatccctcattctaaacaagattcaaatgagttaccccctcactgacctggagagctatttcttctgtcacataggtgcagtgcaccagatgggactgtggcagaagaatagttaggtgaagaaagcctaccgtgtgcctcatggggaaaggattttaaaagaaattatatttcctgtccatagtcctccatctcatataactatttaactcgtaaaaaacataattatgtttctgaatttctttatattttgccaatcagttacagctattttgttgttactaagagcattgaattataaacagtataaaacgccaaatgctcaggaatctaataataaaaggacttttcctggaaagcataagtagttcttttcttctataaggagagcctctgtttgcaaagaaatacggctgtgcttaacatctgagtagtcagcaatcttagtggtggtggttgctattaattgtagttgagatgtgacctacacataatccacagaagccgtggggctttatgagcacaacaattgcctgtgtttgattctaccttgccagggatactctccaagatcctgcaaaatatcatttctctcctttgcactattgagatgcaaatggcgctactggctgaccaccgacaagctttatgagcaataaggaatccaaattccttcaaggcatccttaaatattaaaatgtcatacataaacaaaatatgtaatgaacttcaaataattacaacaaacaaaaatcttatgcgtccctcaagacctgtaagaaatcaaagggtctcagaatatttcatctgtcttatcatcgaagtaagatatcaatgcctctttccatttaagaaaaatcccagaaaccaaatcaaaacaaaaaattctggagaatgcacttgtccaacataaagcaactaaacagtcactgtcccgattattgttctctggcgttttacctaccagcccggtactgcttccagatgttttgctaccttttttttttaattaaaaaattttttttataattatactttaagttctgggatatatgtgcagaatgtgcaggtttgttacataggcatacatgtgacatggtggtttgctgcacccatcaacccatcatctacattaggtatttctccaaatgctattcctcccctagcctccaacccctcaacaggccccggtgtgtgatgttcccctccctgtatccatgtgttctctttgttcaactcccacctatgagtgagaacatgcggtgtttggttttccgttcctgtgttagtttattgagaatgatggtttcccatcaacgatagattagataaagaaaatgtggcacatatacaccatggaatactatacagccataagaaaggatgttttgctatcttaaagagaagcaagaactgaaagaaattcccctggatggacaagaattctataagtgtgtgaaaaatacaacaagtagaactcattaatttatcagattttaatattaacacatgggtaagttgagctttaaagctaataactctactatttctaaatatcaatgatctgcagagattggtgacattcttattccctacatagaattgagatcaccctcccaaaacgcaataaatcagagaggttgatcagcatgaaaatgtctatgttggtcagcaaccatggctaaggaaagaattaggaaattatttcatagctatcatgaggagctaaaataatgaaatataggagatatagactgttaaattaaccataaggctgaaaacattttctccacaaatgttttcaactacttcaaatcctctttttcactgtgcccaaggctaagtgagaggagacccactgggctgcctctctcactcctggcagggcttgctggagatcagaagaataatgcagggaggaagttctgtgtgatttatttcaactgagcataacaaagtggtgaatggggatgtaagcggaaatgttgcaagtgtatttgtgtaagcacacatttcatttctcttagacatgggaagttgaggggagaaacagtctcaataatgacagtggggggttatttttcaaaatgtcttgtctttgatgtaattctgatattaatgtttctattgagattcatgtttattcattcaatgaatatttactgagtacctcctgacagcctggccctattgtaggtgctggagatatgcaagtgaatatgacatggaaggactcagggagataggcaataaatatacaaattaacaatcagtcttttgagatgggaaatcatttgtaaccctccccacccccaaatttaaaataattcagaatttagaattacaaagggacttcaacaatatctcatctgcatttcttcatattcccatgaaataaattttgtggtaagcttcattttgtagaatttggaattgaaattcagtcaagttgaatgacttggcgaaatccatttcaacagtcaatgggggagccagcgtttctattctgcagaacctctgctctttcactgtatcacacaccacctccacagattgtttttaacatttgtgcttctatgtgcagtttcaaaatctggtattaaaccactttccaaattcatgtatttaaccctcccacctctggtgccaactcagcgctgcagatttcaaataaatcattgctttcaaattaagtttactataaagaatctattggaaggtaatttgataagtggctacatcagatgaaatgtgaacatgactttgcatgatcactgccccttctataggcttttctggaggaaacaccttcactggtctcgagacactctcactttgctacatggcattgtgccatgccccccactgttccaacatcccccctctaccctcactgttcctgcagtaccccttgctgccatcatcactgcactcacactcccctggctcagacttgctctgcagttcctggagaaattctactttgttgcctttccagcctatatacagcagtattcccatgtccttttttgtttaaattcttagccaatgtctttctccaagttttaaaaactaattgttcctacaggttttatttgtccttaatattatcatgtaagaaattaactttggtgttgtgtcatttattgtctcaaatcagccaagagttagaggcgagcagggctgtttgaccacattgttttggcatgtccagggcttgttcactatgggaccagcagcacgtagcccagtctggagcaaagagcctccttcctgtgcatgctcctgacatcagctaaggttctggctcaggcccaagaactaggtcaacacatttcaagatctcaacgtgagatctgggtgaacgtccacctcttaagatgttctctccagtgaggaaggccagctggaacaggtcaattgctcgaaacattcactagctgcctttacaaggacttagttaattttaacaattcttttaccctctagacatttttaatgcttaaatatcttaatttaactgtttaataatagttattgtactttaataaatatttcatttattttaaatgttttaataatttcttttaaaagactaggaaatatagacacaaatggggcaattctatagtctaaaattatagaggttaactctgtttttcctggttgaatatggtatctgatgcttagctctgtattattgggtaagttgctgaagctacccgtacaatagggataatgatagcacttgacttccccaaagaaacccctttaaccttggaaaacgattcccttcattcagtttcaactctgtccctgagggccatttaagatgcagccctcctaaaaatatagcatttgaaatggcatttccaagatttgtggataagaatgctgatgaccacatgtgagcataatggcgctttaaagccaagatttcctcttccatagtctatgcacagaaatctgcagcctcaagctcttaaattcttgaacacattcaggttttaaggaaactgttgactttatcaatgtagagatgggaaagaaatatgcaaactaggcctgcaccttttcataccatttggtccaggtacatttgtctcctgggattggaattatatacatttctcactgatcaataacataaatattgactttcacccatagaagtcatctctgaatggtcttcatccaatacttaaaagtgctcacatctgagattctagaaggaccatctaaagtatgtgagatccaagcatgcttccaggttactgtggtaggcagccttcaagatggccctcaatgatccctgacacttggtattcacgccctctacattcctctctcacattgcactagggtggtctgtgtgaccaacagaattggctggaagtgacagtatgtcagttctgagattagattgaatccattttgttgctctttcattctctcacaatatttctcttgaattattctctctggggaaagcaaactcttgtgcagccctgtagagaagtctgtggcaagaaactgaagttctcactcaacagccatatgagcaagcttggaagtggatccttttggtcctggtcaagtcttcagaggctataatcctggccaacagcttgtctgcaacctcatgagagaccataactagaaccagtcagcctaaagagatctttagaaactgtgagatcataaatgtttgctatattaggcagcaaagttgtgatgtaatttgttacacagaaatggacaaccgttacttaggctctacctttgtttcatagcagatcaccagaaacaacctgacgtgagtattttagcagtggctttattcagttaggggtcactgttttactttttgcttttacagaggggtgacttttagaaggtgcatttgaagaattcttctgtgtcttttgtaagactataatcaagaacattgtctatgacgtcacttcatgctttatttctcacagaattcgataacagaaaaaaacacattgttgatgacttgagtattttctttaactgacctgcagaatcataaaaactgacgtgctttccttttcactctgttgccaggatgctctgaataaaatttagttctaaattaaggtctattttgtgccagatacacattttttttaagaaagtgatacagttttttacttttagttatcctttttgaaataaatattccttagccctgtaagcccactcaagttctttatggaagtaattaattcaaggtactgtgaatttgttgattccctgttacatgccaagcagggtgcgaagctctggaaacacatagatgaataagacaagaagtaaggttttctcttatggagctcaaaacctagtgatgaagagctatgtggagaaccaagcataaaactaggtgacagacacagtcttcatagagtaaatgtagcaagctgggagtgctagtgagagaagatgactcctgagttgggatggcaaccagaactgggcctgatgaagaaggagaggctggcattaaggctcagagaaaataatagttgtctaggatgtggtgaagaagtttagtatgactgaagtggggtggagtgaaggtggaagtatataaagtgcaaatcaaacacaattaatatgcctccgagtatgtgagaacacagtttacatggaagagattgcaatacagtaaaagctactttttccacattaggtactggctaaattataaatagctaacctaccagagaataataaagccatttaataacagtttacagtactcccactcagctgtgatattgttgaattcttgcaaaacaagaaagaagcaatactttagaactggaaacatgtccaattcttattcattgcccacagattctggcaagttttcaatgagggcccctccggttgaaacaagttagagactgaattctggaggctctgcttctgcaggaaccattaagcgtcacaaagggacaaatgcaccaacatgaagcagaagtgaaagccccttttctgcttgtctaaaccacatggagcgcattatgttcatatttactacaagtggtctctatattttctttacaggactttagattgttgccccaaataacaaatatacttcctttggagcgcatcaaaagagcagggccaacatcctgatctcagtgtattaaagaagtgcctgagtgctcaaacattcagcagctaaccagattcatcagccctttacacatttggtaggattctaatggtgacttctttgatggtacactataacttgttctaatctttagaacagaagttgccaactcaggtgcctgcaaggccacacctgtgatggaaaggaacaacctgtctgtggaacccaggagaatgatgggaaccccaacacaccaagccagcagctattcccacacactggcacagggctgcagtgttggaacatgaactttctggttatttttgcttgtttgtttaagagaaactgaaagtctaaaccattgtgtaaaatttgccaatttttaaatgttggcatcgcatataaaagatttaagctgtgtgtggactaaacaaagtacatctgcagatgagatctggcctgtggaccacacatttgtaacttaagctttagacaatcatattagcagatattatctctggcatatattgaaggaattgtacagaaaccacttttaaggcctcaaatttgttttcggtgaccttatgacatcactcagtgctgacaggtgtatagaaccgtgttaagcaagttatgcaacctcagaaagccattaaaagatggttccagatacaagtacaaataagctgatagagaaatctctcctgcatttgtgtatataaattataacaatgttttaaacacatagctgaactcaaatccccagaggtaagaaacaaagggaaaacccacagtgagaacgataagctctgctccatgctatttataaagaaaaccctcacaaaagatgtgtgggtgctgctttaactgacctgaagaatcatataaattaatatccttctcatttcattctaacattgtctcacaaaaatatttaaaagatatacataggctgggcacggtggctcaggtctgtaatcctagcacagcacgttgggaggctgaggtgggtggaccacctgaggtcaggagttcgataccagcctggccaacatggcaaaaccccttctctactaaaaatacaaaaattagccaggcatggtggcaggcgcctataaccccagctactcaggaggctgaggcaggagaattgctggaacctgggggaacgagatggaggttgcagtgagctgaggtggtgccacttcacttcagactgggcgaaagagtgaatctctctctctctctctctctctctctctctctctctatatatatatatatatatatatatgtatataaaaccactatgaagggaaggcagataatttaaaaacattaaaaagaagagctagtagtgtaaaaagatagaaacagaacagcctgaaagattttctaaaacaactgcatttaaataattaaaaatatcattaaattaaatataaaatacaatgaaagaataggactctagacaatttgaaaaaggaagaattaaaatctagagtgtaaaccataggcaataaaattgaaaactcagttggcacagctcaaccgagaattagaacaggatctgagggaatcatccagaacacaggttaaaaaacaaaaagatagaaaggtaaaatgtaaaagaatgttaatgggcatgcagaataaattaaaaaatagtccaacatatatctgttgcagaagaaagaaggtaggtgagagaggaactattataaaaaaaattttttgtagaactgaagaaacatatcaaattctgagtggaataagtaaaataaacactcagatttgctgtagtaaaactgtacaaaatacaatacatagaaagtaaaatatcaaccagagagaaaagacagattagctaaaaaatagaataacaattacagagcatatttgatcaattcaaaaccagaggatgtttgtnnnnnnnnnnnnnnnnnnnnnnnnnnnnnnnnnnnnnnnnnnnnnnnnnnnnnnnnnnnnnnnnnnnnnnnnnnnnnnnnnnnnnnnnnnnnnnnnnnnnnnnnnnnnnnnnnnnnnnnnnnnnnnnnnnnnnnnnnnnnnnnnnnnnnnnnnnnnnnnnnnnnnnnnnnnnnnnnnnnnnnnnnnnnnnnnnnnnnnnnnnnnnnnnnnnnnnnnnnnnnnnnnnnnnnncacatggaaatgggattccagctccaaaccctctgggcagtatatgccatataaaatcacatggccactgacagtggcagcttcccactcttgctgtgatttttctcttgtttctcacacttggagaatttccttttctctccttcaaaatcaactctacatttagtaatgttcgctttttaaaataaagcctttctttgagtttttagtgcataggacctatcattttaatccaccatgttctgaacattctaggatcatgaaatatggttgttattattcttacttgtcctccaaccactttcttccaataatggattccatgtcactggtcacagggatgggaatgtgactcagatctgaccagtgaccttgtttaattcccttcgagtattatgtgattggcttatgggtgatcttctgatacaagcagaggcaaacagagtctttgtgactgatatgcaaatattgggagaatgaaatgttattttgagctaaaaaaaaaaaaaagtaagcctggagatgccattagtcaccttctcctgctttctagagtaagctatctatctgcaccatgaaagaatgaggctagcactcagagacaatcggggccaagagagaaaaagaacagatagacagccatgtttgaagtcttaagcctggcatgtccagagtcagctcaatccctgttaaacaggccagtggacaaattttgctgaagctaatttgaattgggtttctatcactttcatcacttgcatctgacttatataccaataaattaaagtacattggaactgagataagaaaccatccacatggatttcttttatttatttttggtaggccaatttgtcacgcatgacttgacacgagcaaagcaagttctaagttacggggtagagttctggagacgctgccagtgaatgtcagatctcatccgtgagacaaaagacagagtcacagaatataatcaaggtcaagtcccagtaatctgaacagggacattaagaggtagggtaggggagatgccagagtcaggataccagggaacaggaatgagagaaaaacaacaagacagcagcagcaggcaggggtgtgggcagcacaccgagcacacaacttaaagctggaattcaggtgagcactgcttcccagcctttgtttaaagatcccagggtgggccttgccatttcctgccatgtgatgccacctggtgtctgaaaaaagaagtcagcatgaaattgactcccaagacaaggagtccttaagcaaaaacagccataactttttttttttttaattatgtatcaccccagtatctagacaggcatcaaaataaatgagtttcatgctgattatcagttttcaaggcaaatatcaaagtgaattaccttcagaaagatgtgtcaagatataagaaacttgttcttaagttaagcagattcatgagaaatatacctctggttgtgataacagtttcagttaattctgatcaaaaggggacagcttcttatcacctctgtgtttacaactatgggtcaaattggaggagcactaatgagggtttctaacaaggcttttcaaatagttggaagaagcagaatgaacatgaaatatctatctctggaagaggttttaatgattagtattataaaacgtctccccatctgcttctgaaggggtctatgaactcattcattcagtagttattggagaacctaccaaataattgcctatgtgttgtgagggatggagaaaatttgcctttaaggaactcgaaatctacttcaagatgacgttaccaagagaaaaaatggaattattttaggaatatatttttataaccaaaccctatacatgtaagctattttctgaaatggtttctagggtgaggttttgttacgcatattaaatccctttatagatattgtttgcctacttcagtgaggagttattgagggccgagatgagtggctatgcccatccagtctttgtcaccaacacttggcataatgtctggcacatactgatcctcagtacatttctcttgaacggttggatgatagttcaaggttcccctcagttccacggttgcttgagtcttatagccatccaattaccttccatattaaatttccctcaagatacatgggcggtaagaaatgtagtctttcaaaatgccactcaaagtgccaagcgttcactggtatcacactttaaatgacattatctagcaagaacttctctgcagcataacagtctcatttaaaaagacaaaattggtgctccatttcttcatctttttaaataattgatgacatcgaatttccttataagcatttacttaacagggaataaagacatctagtatgtatttattgtcatccaagagtcagctgtttaatgagatacttattttatctctaagaaaacctggaggcatttgcacactgtggaattattttatgagtaggtttcagtacaacaatagcagtatttctgttttgcagataaatggcccaaaacagccaacatcttctttctcttctatcatgggtagcaaaagaatttcagacttctacctctgtgcaatctgcacttaaatgaacattgccaattattaagtatgttaatggggatttttgggaccagagtctatcataagtagtttgctctattttggtaaatatatgcaagccaaaagaaaaaaataaaaatcacttgtgattccacataacacttctgactccatgtaatttatatataaataatacaaatgttatatgttatttatatatacaggtataataaaatatataaaatttaataatatataattatattcatatataatacatataatgtatgttagtatatataatatataattttaggtgcatttgcacatataaatttggctgtgaatttttaaccaagctagatcttattatatattaaattttcttatttgatagttattaaatataaatattatatattaaatttcctgtttacttaaaaatgtattgtgaatatcttttcccatcaatatattttttctttattattttttaaatgacttcatagggttccatgatattaatatgctataattcactcaaccaactagtaaccattgtgcacaacttcttgctcaaatcaatgcattcatctccatggagagactattgcacatgcccataattacttcttagaataaatttctagaaacaaaattgctggatcaaatgattcacaaaatctaatggctcagtaaacactgcctttgtaaaagttttatcactttcctttttcaccaatcatataggagggttctcaattcccaaaccctgacttactccaagtatgattattcttttttgagtcctgaagatttaaatatttgccaggtaaaaataatactccattgttggtttaatttgttttacttcattattagtaaagctgatcttatttagtatagctgttgtccatttatgtttcttcttttgtttattaactatttatatcatttgtccatttttctattatgcttaccttttattattggtctttgatgataggagtaacagcaacagctaacatttaatgtgtattgagcatgacccaccaggccctgatttaggtgttttatgtttaatcccatcctgtgaggtaagtgctattactgtctattttacaaatgagtctgccaaggcgcagggggattgagtaacttgcccaaggtaacgtaaataatgaattaggtatagtgatgagattaacaatttatcatgtatattacaaagactattaactgatcaacacatgtgttgaaaatgcttcccttggtttatcattcgtcatttaatttttttgtagtgggtttttgcctgctaggattgcttgactctattgccatcaaacaaatgggcttttattttatagtttctgcttttgatatcttgatcacctgaagaagaatacataagtaaatataattcaaacacattaaaaacattcagactgcatagaagagtataaaataaagagttaaattatttttcatcctttgcctatatcgtgatcctacacagcaaaggtatctgattttaaccatttatgtctttattttttctgattgttattctatgactcctaagaatacgcatatattttcatttcttgacttagcaactccacatagcatctgttcgtttcctagtatgccagatgcagaattttagttagcttcttccttcctttttttcttcttttttctgcttaacttccacaagtaatatcagttttggttgtgagcacctttataactttaagtaacatattaatacttcaacctctattttttgatttatcaactttagacagtatgtcttaactaagtgattcattcctaatagaggaaatcacgtgtaaaaatggttattctctaagtttcctggatcataaaatgccatatttatgaagaaatgttcactagaagcagacttatctttagtaattttaataaaaccagagagatctctgtaagtagaatgaaagatattgatataaataagggtagaaattatatttatatttatatagcataggctctgtagattacagggcctttacaaccatattactttatttattactcagaatagttttgtaatgtatatagaacaactattctcacattttctagatcaagaaattagcatagggagtttatggccatacaaaatcactgtagtggtcatctaggtcagcagtccccagacttttcggcaccagggaactgtttcgtggaaggcgatttttccacggattgggggaggggatggcttcgggatgaaaggcattcctcaggcattagacgctcatagggagtgcgcaacctagatccctcacatgcgcagttcacaatagggtttgcgctgctaggagaatctaatgccgccgctgatctcacagaggcggagctcaggcagtactgctcactggcccattgctcacctcctgctgtgtggcccagttcctaacaggccacagaccagtgccggtccacagcctgggggttgaggaccccgatctaggttttgttttgttgtgtttctatccagcatccacttttccattatcatggcagtattacctgagcaataattctacctttctccagtctcagctcatgtgcttccaatgaagctgattatatacccttgaactcacggagcaggtgacttagacccgaaccaatacatgctgtaccttttactgaccatagtgattattccaagataaactgcatcagaatctatgaaagttactaaaatttagtctgggaatggtggaacaaaaattcttcgtcaaatctcccgaagagacagccctgggaaatgctggcagccatcttgcaaccagaagagggcgctaaccatgaagttgagcgaagaaagattcctgttcatttcactggatccttgactaagccatttctattaccggtgttcagttacatcagctaatacagattctctttttgttgacctcagtttaggttggtttcctgtcaactgtagtaattgcacagttaattaatggcaatcttgacaccagatcttctgactcttaacctagacttctttctactctaccatgctgcctctgaaattaagatttttgttcagggttcaaaaacacacactccttgagatctcttccatatatcttttgccttccttcaatagcctattaaataacatttagaaatgcaaatctatcatgtggaattcatttgtgaggcagtatgcatacatgtttgagcatgacattccctttatgcttgaaataagagtatgggttagggacaagctaacttcaaaacttttatgttaaataaagttatttgcattttagcacaaacaattctggaacattgtaaatcacaagagcgtgatatagcacccaccacctgctgctacgtacaagagttgtggccatcaaatttaattatgttaggtatctgaaattcagagcacatttaacctaagcaacagtattataattaataataggcttcttatattagcaaagaaaagctgctttaatctaaaatgtggctaaatactagagcacagtatttctacaatactattaaaagtgtaaaaatactaaaactgaaaaagttggttcttaagcaaggaggtttgctggcagaagatgggaaggtaaataaaagtatgtggctatttcagaggggctctgggggcttggccaagggctatagtcattaataattgggttgcacatcaaaatggaaaacttttttttccataacacaagaataactctatcactgttcttaaacttcaaaaccacgcaaagatggaactaagagagggacaacacaaaagagattttcatttgttcttctaagacacacttcaagtacatagagtctgctttcaaaaagttgctatctagaaaggcaaatatatatgtaaatccaatgctgtgcaggggtgaagcagaagctcagcccatgggctggtggttcccaaagaaggagactgaaggaagagttgaaagacttgattaggcagaaacagaagctgaagagggcaacccaggaggagtgagctttgttcaaaggcatcgagataccactcagagagttgtgtcagggtgctatacatggtttagtgtgaagagaaagaaaaatggagatgcaatgtttgaacttttagactgaaagccatagaaaacctttaaatgatatgcaaatatggctttcctaagggaaccaggaaatggttggcagagagtgtgtggagataaggcattgcaaggagaggaaatacgtgtgtgtaaatagatgtacaaagagaatagtatgtgtgctataaattaagtttaagaagcaaataagcaagtgagaataagtgaagagaatggcacatggaaatgtgcaaaaaggaggaaatggtgagcagcagacagcactggtagacagcctggaccaggacatggcagagctatggaccactcagcagagctcatggaaggaaagagctggtatttgaatatgtaagctttggaagtcaaatgtttttacttacgattaccctttattttacattggagctcactgggatcactgtacgataccagaattgccgaagctgaggagcacaagatttcagctagaatggcaacatctcattcctagaaaggaagagctcttgccatggtgtgaaacacatcttcttttattaagacattatgaagacatgggtagagaggtaggagaggcatctgcaataccaaccatatattgacatgaggagatactacatggactatttcaaatgctcccaggttggtgctcaacagcatcaacatttattcttagagtctgcatttttaatggaaaactactgtgaatggtggtcctgaaagcagaaaggccaaacctttcctggttgtgtcggcatgattctttcccaagctcatttgcactttagtggttttgctttgcttggccttttccaacttggcagctcaggaagtaaaaatgaggaactcagcagatttttaaagagttttactccaaatgttcttttaatgctagtatttcttggacagggattcctgatgtcctaattaattgttcttggtgtttctttaaaagcatcctttagcatttgtgaatctgcccatggcttttgctcttaatttgcactcactgatattttcctttaaagcaggaaagacacttctctgtggccaggtgaaatataagtatatttggagacacacttgaaaattgttgaattcactgtcaactttggggcagcagccttaagaaatgtcaactggcaaaaagaaagaaaaaaaagagtagtgctgctctgtcatttcttactcccctctgtgagatctgactttaacaatcttttgttacttcacaatacattttaaactgcatttgaagtaattaacacccagaatagaatctttttgtcacattgaattatcagatattgactttcctttgggatatctgacagttgcccaaaatgttggtcttaatctaaaaccaagaagagacctctgacatagtgaaagccactgaagtggcatttattaaatataaatggtaagtgtctaaaggggaggtaaggaaagagcactggctctcatccccccaccctaatatccttccagcgcaaagggaaattgcactggtgctgagctgaagctccatcagtttcatccgtcatgtgatgttttaaagatgtatgcattcctatacagcattacctttgcattgagaaataaagagtattctgacccttaggttctggctccaatctgccaatctgcccataaatacaagggtttctattagactattatctggaaagtgacttatataaggcgaaaaattaaatgatattgatttgaaatgaaaaaagctcatttatgtgcattttaggaacctaagtgaatcagctaaatatatgcactgagaaaaataagttaccctctaggtagtatcttgtaataagctggaaacataaaacccattaatagtattagaaattagatgcctaatgaattgtgcccattatggaaattttctgtgataacaattccttgaaaaaagctagagactgcccgtatctctgtgacataagagaaaagatacaagtgaaagcatatttcacatgattaaagaaacataggccaagttctggtacttactatgtaaggactatggccactgcatcattcaacacactctctccaaacaagagtgtgtacaggtcagggtcgacgtgcagttcatggaaaatggccagcactgtcactaggaagacacacacaaacatgcaggttagcttggatgcaggcatggagttttccttggctatggtcaccactcaaaaacattaatgaaatgctcatcttctcaaatccaatgactatactaacaccagacctttattcaaaaaatatctgatgcttaagaggcttctcttggctccctactgcttaaagataaaatttgagctccaaagtacaagtaccctacaatctgcaccttgcttaccttctagcctcatctccctctgccccctttgctgcctttctcaagtcacactgaacttgccataatttcccaaacacactgtgtagtttcttaactacctttgcattttgattccttctactatggcagcaattccttcctcgtccacttgctaccatccttgtattccttaaatacacacacacacacacacacacacacacacacacttcttgctaccaaggactcatttttttcattctttaagaacctttcaactgtccccctcccaacccttcaactgcctcagcagaggcctggctcactcctttctggatcccagcatttggatcaaatcactgaacttaccacagaaaggactgggagctccctggaaatggggttcatctttggacacatggtgttagaccatactcagtaactgcttgatgcatgaatgactaaatgaatgagtgaatgaataaatgaataaatgttgttgcaatggcctactcctgtgaagggagacacggttccacctgagtctcattctgtcctgagatcacactcacccgtgaagatggactcaatgatcttaagaacaggacatgaggatttgtttctggttgcctgctgcatggcctgctactatatgccatgttcttgtattgagcctctgtgagtacattagggcagtcaatactcacacactgattatctgtgttcatcaaaactattcaatatcttgatatttaaaacagttaagcagagtgtgaacagcaatcattaggaaaatgatccattgaattaattgccaagggggaaagagggaggttgaaaatgatattgatggcaaatgtctaaggcagaatgggtatttttaattctgtttttcctttcctatttcatgggtggtgaggttagtaactgtgttgtacaaaacagtgctacgaggaaataaaagcaagacagacaagttgaatgtgaaggttttataagtaggattaagaagtttggagcttgttctttcataatagagagtcatgaagggttttaataagagagatgacacaatctgaactttggaaataaagctcaggcagaagagcagagggcagaatggacacatggctggaggctttcccaataatttcaggaagagatgagttgtaccaggacaggaagaggcccggattcatgctcccaaactcttacatgttcactgtcctgggttctaatagaccaatgaccactgtgctttgtacttcacaaatatacctcactggttttcatcttctctgtgtgccacaagcccttagcacagtgatgcgacatagtaagcctttaatgagtgaacgaataagagagaacatcaaggaagatatagcagaggtgaccgcaccccagagatatttgagatggaaaattggtgggtgttggtgcttgagaggcagcgatgatgaactaactcgcnnnnnnnnnnnnnnnnnnnnnnnnnnnnnnnnnnnnnnnnnnnnnnnnnnnnnnnnnnnnnnnnnnnnnnnnnnnnnnnnnnnnnnnnnnnnnnnnnnnnnnnnnnnnnnnnnnnnnnnnnnnnnnnnnnnnnnnnnnnnnnnnnnnnnnnnnnnnnnnnnnnnnnnnnnnnnnnnnnnnnnnnnnnnnnnnnnnnnnnnnnnnnnnnnnnnnnnnnnnnnnnnnnnnnnnnnnnnnnnttcaattgagtccttcctccttctaaataagacttaactaagatgcccagtcttggagttattcccacttcctgacagcatcaaatccagaccaaagccctgatgccttaaaccctcactaaaataaccaaacataaaccgaagtcctataataagtcctttctaatacccactgagacataacatgattccccatggtattcactttcattgcaacgagtaataaaagcatcttgttcaactataggttgtgttctggtagtctttgctagagtagcaatccaataatatgatggatcaggctgacagctcagtcaccaatcactatttgcctctggaggtgatgaaatagaagggtcccagcaccacctttaaagtaatcataccaaaaaagttgaacctgaatctgattaaacctctgactataaccatcagtttataagaaatacagggcactgaggaatattttaaggagctatattcgattcaaccacaagacaaattacctctttttttttaaacaaatacctgacaagaaaataaaaaataaaagggaaacttctagataaaaagaggcccaataatcatatcaatccattgtaatatgctgcccttgtttggatcttgatttgtgcaaactgctatacaaacaaataatgacaataagacaattaggaatattaaaacaatgagtagattttggacaatattaaagaatgattgtttcaggtcttacaatggcaatactcatttttcaaaacatttacaaagaaaataatatgattgctagaatttgctttaacataatccagtcatgatgagagagtgggtgtggagggggtataaataaggtgattgcccatatttgataattgctgaagggcatatgccaattctttttactattctccctatgtctgatatgcttgaaaagtaccacagtaaacattttttaaaaatatctttaaacaacttaatttaatacatcattctcaaaagaagagaagatatattcactggagagaaattcaggatgataactcaaaatggctacatgttctagagcaggggtgtccaatcttttgggttccctgcaccacattggaagaagaataattttcttgggccacacataaaatacactaacactaacgatacctgatgagcaaatagaaaggtctgtgcataaatctcattacgttttaagaaagtttatgaatttgtgttggccagcattcaaagccatcttgggctgcatgcagcccatggaccactggttggacaagcttattctagagaaataaattgtaatgactttaaagatctctcccactactgaaattactttctaaccaatttctttagcactatcaaaatattccccttttcttttcttttgtaattactaacagatatgtcaactgcaggtgaagaaaaatagaaattattattatgtagacgcaggtgatggtcttggggagaaacattcaatttaaatgtttgattcttaaaagaagaaaatatattatttgagcaattacctggatctgtagcagacatcagtgaaccaaaaaataaacagtcagtgaaatgaaagtctccatttttcagctggccagcatgtatcatagccttcacaaaaccatacataattaacctgttgaagagaaaaacatgaccttcaaacatcaagatgaaccctgtgtaaacccatgctatcataagccacatgctaatgtttttcctgaatacgtatcatgcacaaattgccaccatcctgccaaatgacagccgtgctaggtctctgtacactggaatctcttggctatgaaagacaattttaccaaatatcacaatttattcacttggtaaaaggtaatgcaacagtttatagtatattccaatgaaaacaagataaatctcaaagatataaaaaataatctgtcaaatgtggcacagcaaatcatatccaaaaccacagcagctgtgctgacatttgtaaattgattgcttttcagttttccttgttttgtcactggcggtgtctgaaaagggttcaaatttcaagtccatcactgtgatgaggaggatattggccaatcacaaggcactcagtcaaccagtcactttataatagatgagtctctgctgctagtggtgtcaggacacttccacactgggtagagaatccctgttaggttagagcatgtataactccaggtcactgtttaaaatgaatactgaaatagttgcattgcgatctttcaaggaaagattacataaccttactgtgcccacaccatggcatgcaaattgtctgttttggtcatcatttgccaacctatagcttttaattggtatttaattatttaactgactgattgattttgctaagatcctagtagaggaaatagagaggtgggtgaactgaatcacagtgtaatttaagaactgtaagagtctttagaaactatagaccatcaaaccaatagatggatgtttaaacactcacgtgaacttaaagttagttctcaggttttgggcatagctaaaaaggctaaaagtcagatatttaaaaatgtcaataagaatgcagatattttaaattacgttaaaaaaaagtatcactatgagagaatatttcagacctaccggcatttaaatccaggctctactatctactatctatatgattttaagttattactaaaactttctgaacctgaatatccatgaggtagggataacagtaatagcccacagaattgttttaaggattaactgaggtaatacatatttggtgtctggcacatagcaaattctcaatgaggtcactgaggctaaaaataatgatcaaaatagtaggtaacatttacttaccatttctacttctacacatgctttatttaactcattaaatacccacatcaatggtaatatttttcgtatttttagcaagaaaactgaatatagtgtgatgaagtaatttgcttaaggtgacacagctattaagttgtgaagcccagatgtgaattgagaaggtctggctctaaagccttggcttttaaccatcacactgtattgcttagatcaacagttctatattttacatgatatgttatctcatgtagtacaccctcaaccatcccatgagttagttgctctaggtagtccaaaagacagcaatgaagtatccctaagaacttagaaataattctaccctctgaattgaactcttaagccaatccataatggtttagagcacaggggcccaacattgctttgcaaagcatggattctagaaggggaggctgaatcttaaccaggctgaaggtattaaatatctgagaaagactgtcagtgggacacagcatgggagctgggaaaaggcaagtctaagaggcctcattcttggcagctcatccacacttatccagaggacagcacactgccggttaccaggtgcacagtctcttgacaagtatagggtagcttcattcagcttatttattcattcaaaagatacttcttttattactattattattattatactttaagttctgggatacatgtgcagaatgtgcaggtttgttacataagtatatacatgccatggtggtttgctgcacccatcaacctgtcatctacattaggtatttctcctaatgctgtcccttccctagtcccccacaccacaacaggccccagtgtgtaatgttcccctccctgtgtccatgtgttctcattgttcagctcccacttatgagtgaggacatgcggtgtttggttttctgttcctgtgttagtttgctgagaatgatggtttccagcttcatccatgtccctgcaagggacatgaattcatccttttcatggctgcatagtattccatggtgtatatgtgccacattttctttatccagtctatcattggtgggcatttgggttggttccaagtctttgctatcgtgaataatgctgtaataaacatatgtatgcatgtgtctttatagcagaatgatttacaatcctttgtaaatcccagtaatgggattgctgggtcaaatggtatttctggttctagatccttgaggaatcgccaccctgtcttccacagtggttgaactaatttacactcccattaacagtgtaaaagcagctgttgtttcctgactttttaatgattgccattctaactggcgtgagatggtttctcgttgtggttttgattttcatttctctaatgaccagtgatgatgagctttttttcatgtatttgttggctgcataaatgtcttcttttgagaagtgtctgttcatatccttcacacactatttgatggggttatttcttgtaaatttgtttaagttctttgtagattctggatattagccctttgtcagatggatagatcgcaaaaattttctcccattctgtaggttgcctgttcacctgatgatggtttcttttgctgttcagaagctctttaatttaattagatcccatttgtcaattttggcttttgttgccattacttttggtgttttagtcatgaagtctttgcccatgcctatgtcctgaatggtactgcctaggttttcttctagggtttttatggttttaggtcttatgtttaagtctttaatccatcttgagttaacttttgtacaaggtgcttcttattgatcccctaatatgtgtcaggctccatgctaaaggcacaaattatatcagtgaacaaacaaagatccctgccctcatggggcacacagtttagcaggatagacagcaataagacacaatcagaaattcaaattataactgttatctacattactttctgatcaacactgggacattctggacagtcatggcattagcagagaaatgctcctcagtattcatcccttcagcctcttctggcattagcccaacttcaccttggccctttgtcacttgaactacagttcaaatattgaatatcaattggttctggaatcaatataaactttgtgatctgtcactatagttctgaattctatatccattagttaattttgcaagttaggaatctgaggctcagagttaaaatgacttgttccatattgtacagaagccattaaattggatattataaaaaatatatgtatatatactaccaaggtatggcagggttacatggaaactagaagcctcatatactattgctggaaacgaaattaaagtttttatggaaaacaatttggcaatttattctaaaagcattaattttagaaaatattctatagcttattaaatagtttcctataaatttataccaagaaattaataaaatatgtaccaaaagatgtgaatttagatcaagattcctgttatttacaagaatgaaaaattcaaagcaatcttctacatgtcaaatgaatgaataacataatacatatgatgacagactaacatgcaactattaaaactgtatataataatatatattagaaaaataaattgataacacaaattataaagtgatatataaaataaagtatactgggcatggaaaagtaaattattaagacaagttaatgattatatctaattttataaaattgagtatacttaggcatacatataaacagaaaaagttagatgcatacagcctcatgttattgttaatagtggttatataatagaattcgatgactcctcctttttgcttttctgcatttttccagttctttttaaataatagccataataaaaacaaagaacaatgtacattagtgagtgctattatggacacaatagttattcattgtgttacttaatcctcacaattctatgagctatgttctataattattccttttacaaatgagaaaagtaagactcagagaggttaactaacttacctaagatcacagaattagcttgtgacaaaccagagtttgaatccaggcagctggacaccaaagcctacatacttaaccaccaactctataatgcttttgaaatcaggagaaacatgcatgtgtgtgagtacacacacacacacacacacacacaccccacatacagtttgctttttcaaaaaagaaagattacttatttactccaaatcaactccttgacttaaaataaccataatttcagtcacttccttgagataatacaaaaaataaaaataaaaagcccagttcagttcaagctcgtatggtaattgttattattacaaacatagcaaaggccattatcaatgctaattataataagccaacaattactatgcacctacaatgtgccaggcactcttataaatggtagctattgttattgttggcacattattaataaaaaaccaattagttataactacattaactgggaggctaaaaaatgaagccacccattaccagtcaccgtatcctcacagagtggtatattctttctgtcatcacttcatagaaggcacgatgactcaggacaggatagacgcaatttgatggacgagagattctggtgaagtctagtgcatacaatgccctgaagatggcaaacctgagtcagatgtcctcctgtggacactctgaggttagtgacagcctgggttacaggggtggacagaagcagaaactgtctcataaaaactaaaatcattaataacattgatttcaacaaatatccaattagtaatatcctttgaaaaacagagtgctggtgctatagtgcatataaagacagaaatccatgacctgctctcaaagagtagggactcacaggatggcagtcataaattttactctaatagaaggcattgcataaaaggggatttgggaaaatgcttaacatactcatttcatttagagttatgacgcacacactgatttaaatttcatgaggtagtttcacactattaaagccctacactttaaagctatgttataaaaatgttcaatacaaaaagtccagaagtttattggttgatgattaaaatatgaacttatctagatcttaaaggatctctctctcctctttttaaatacctcctaaatgatataccgaaggcgtttgatgtannnnnnnnnnnnnnnnnnnnnnnnnnnnnnnnnnnnnnnnnnnnnnnnnnnnnnnnnnnnnnnnnnnnnnnnnnnnnnnnnnnnnnnnnnnnnnnnnnnnnnnnnnnnnnnnnnnnnnnnnnnnnnnnnnnnnnnnnnnnnnnnnnnnnnnnnnnnnnnnnnnnnnnnnnnnnnnnnnnnnnnnnnnnnnnnnnnnnnnnnnnnnnnnnnnnnnnnnnnnnnnnnnnnnnntacccctgttttggggaccagtcccaattaactgtcagaaaagccacatccatgactggaaaaaccttgtgaaataggccactgtgtacagcttgctctgcagtgggaaaacccaggatctacatgtgctggaagcaacatgaaagttatgatctacatctaaatttctgaattttatacccaaatgtcctttgggaaaatatcatgccctacttatttgttcagattttatggatagtttcaatttcacattttcttttttctgaagcatgtgttcaagggcaatccctctcagaactcataaactgtgctaggctggagaggactgggaagttcccctagtgaaattcattcattcatgtattcattaatttacacattgactcattcattcaacaaataattaataatatacataattcctattctaaaagactttttattttgagatagaggtagagcaagacggtagaacagaaggctccagtgattgtacaccccacaaatataacaatttaacaactatctacacaaaaaaaaagcaacttaataagaaccaaatagcaggtgagcactcacagtacctggttttgacttcatatagctaaaagaggtactgaggagggtaggagacagttctgaaatgccaatgccactcctcctccatctcctggcagcagcagtgtagcatggataaagagaatctgtgcttctgggacaggaagagtgcagcaattgtaaaacattgtactgaacttaccggtgccgtgtcacagcagaaagccaaactgagctgaactcagttcatgcctttccacagaggaagtataaaaccagccttagccagagaggaattgcctatcccagcgaatagaacttgagttctgccaagcctccccactgtaggctaaattcctctggggccctaaataaacttgaaaggcagtctagggtacaaggactcaaattcctaggtgattctgcagctcagtgctgaactgggctcagagccagtggactgggggcatgagacctactgaaacaccagtcagcgtggctaatgcggtgcctgtgtgacccctccttcaaccgtaggctgcacagctcatggatccaaaagagatcccttccttctgcttgaggagaggagagagaagagtaaggaggactttgtcttgtatcttggatatcagcacagccacagtaggatagggcaccagtcagagttgtgaggcccctttcccaggccctagctcccagataacatttctagacacaccctgggccagaagggaacccactgccttaaagggaagggcacagtactggcaggacccatcatctgctgaccaaagagcccttgggccctaaataaccagcaacaatacccatgtagcatgtcatgggccttgggtgagactctgagacttgctgatttcaggtaaaactcagcacattcccagcctgtggtggctatgggaagagtctccttcctgagaaaagtagagggaaaagtagaaggtattttgacttgcacctcaggtatctgctcagcaacagcaggacagagcaccaggcagactcttgggctcttggacagcatcggtagacctgccctgggccagaggggaggctactgctcggaagagtgagtcctaggccaggtagcattaactgcaagctgactgaagagagcttgggccttaagggaacattggcagtggcctgggagtacttcctgtgggcctatagtggtgaccatggggtgaggtccctctgcctgtggaaaggggagggaagagtggaaatgactacatctcacagtttgagtaccagcttagtcatagtaaaacagaacatcaggtagacttgtaaggattttgactctagtacctggctcccacacagcacctctggacacatccagggcttaggggaacttgccaccttgaagggaaggatacaagactggctggcttttccacctgctgatggtggagcccaagggcctggcagcagccagggagtggttacagcaggccttgggcaagacccagtgctgtgctggcttcaggtctaacttagcacagttccattggtggtggccacaggggtacttgtttcacctcaaccccaggtccaggcagcttagaacagagcaaggctccatttgtttgggagaaagtaatggaagagaacaagagtcactgcctggtaatctagagatttctccccaatcttacctaaggccttcaaggcagtacctcttcgagtctgcaagaaccacaatgttactgggcttggggtgcccctgatgcagatatggcttagataataacacccaagtcttttagaatacctggaaagtctttccaagaaatatgggtactatcaagtccaggctgcaaagactacaataaatagccaactgttaaatgcccagacaaagacaaacatccacaagcatcaagaccaccgtggaaaacataacctcaccaagtgaactaaataaggcaccagggaacaattttaaagcaacagagatatatgacccttttgacagagaattcaaaatagctgttttgaggaaactcaaagaaattcaagataacacagaaaaagaattcagaattctatcagataaatttaatgaagagattgaaataattaaaaagaatgaaatagaaattctggagttgaaaaatgcaattgacacatgaaagaatgcatcggagtctttcaacagcagaattgatcaagcagaagaaagaattagtgagctcaaagacaggatatttgaaaatacacagtcagaggaggcaaaagaaaaaagaataaaaaacaatgaagcatgcctacaggatctaggaaatagcctcaaaagggcaaatttaagagttattggccttaaagaggaagtagtgaaagagatagaggtagaatatttatttaaaaggctaatacagaacttgcaaaacctggagaaagatatcaatatccaagtacaagaatgttacagaacaccaagcagatgtaaccaaaagaagactgcctcaaggcatctaataatcaaactcccaaaagtcaaggataaagaaaggaccctaaaagcagcaagagaaaagaaacaaataacatacaatagggctccaatatgtctggcagcagacttttcagtggaaatcttacaagccaggagagagtggcatgacatatttaaagtgctgaaggaaagaaacttttaccctagaatagtatatctggtgaaaatatctttcaaatatgcaggagaaataaagactttctcagacaaacaaaagctgaaaaatttcatcaacaccagacctgttctacaagaaatgctgaagagagttctttaaccttagagaaaaagatgttaataagcaataaataatctgaagttacaaaactcactggtaatagtaagtacacagaaaaacacagactattataacactgtgtctgtggaatataaactattcagatcttaattagaaaggctaaatgatgaaccaatcaaaaataataactacaacttctcaagacatagacagtaccgtaatacacaaattgaaaaaacaaaaagttaaaaaacaggaggacaaagttaaagtgtagagtttttataggctctctttgcttatttgtttgcttatgcaaacagtgttgttatcagcttaaaataatgagttacaagatagtatttgcaagcctaatgaaaactgcaaatcaaaaaaaaatacaataaacacataaaaaataaaaagcaagaaattaaaacataccaccagagaacatcaccttcattaagaggaagagaggaagaacgaaagaagagaagactggaaaacaacaggacaacaaataacaaaatggcagaagtccctacttatcaagaataacattgaatataagtgaactaaagtctccaaaaaaagacatagagtggctgaatggatgaaaaaaacaaaaaacaaaacaagacccagtggtctgctgcctataataaacacgcttcacctataaaagtacacatagactgaaaataaagggatggaaaaagatattccatgtcaatggaaaccaaaaaagagcanaagtagctatacttatttcagataaactagatttcaagactaaaattataagagacaaaggtcatcatataatgataaaggagtaaatttagcaagtgaatataatgattgtaaatatatttacacccaacactgaagtacccagatatataaagcaaaaaattttcgagctaaagagtgagatagaccccaatacaataatagctggagacttcaacatcccactttcagtcttggacagatcttctaaacagaaaaccaacaaagaaacatcagacttactctacactatagaccaaatgcacctaatagatatagaacatttcatccaatggctaaagaatacacattattttgctcagcacatggatcattctcaaggacaggacatatgttagatcacaaaataaatcttaaaacattaaaaaaattaaaataatatcaagcatcttctctgaccataatggaataaaacaaaaaaatagtaacaaggagaattttggaaactatacaaacacatgaaaattaagcaatatgctcctaaatgacagtgggtcaatgaagaaattaagaaggaaattgaaaaatttcttgaaacaaatggtaatagaaacaaaacataccaaaatctatggaatacagcaaaagcagtactaagcaggaagtttatagctaaaagtgcctatatcaaggaagaaaaaaaacttcaaataaacaaccaaatgatgtatcttaacgaaccagaaaagaaagagcgaaccaaacccaaagttcagtggaataaatgaaataataaagatcagagcagaaataaatgaatttgaagacaacaatacaaatgatcaataaaacaaaaagtcagttgttttattttgtccaagaatgggcaaatatttagtcagaataagaaaaaaagagaatgaagactcaaataaataaaattagagatgaaaaaagagacattacaactgataccactggatcattttaaaggatcattagtcgctaccctgagcaactatatggcaataaattggaaaatctagaagacatagataaatttctacagtcatacaacctaccaaacttgaaccttgaagaaatccaacagatttggattggtcctaaacagaccagtaacaagtaacaagattgaagttgtaataaaatgtctcccagtaaagaaaagcccggggaacccagtggctttactgcttctatcaaaaatttaaagaactaatgccaactctgctcaaactattctgaaaaatagaggagaaggagggaatactttcacattcatattatgaggccagtattatcctcataacaagaccagacaacgacacatcaaaaaaagaaaactgcagatcaatatcctgataaatattgatgcaaatatcttcagcaaaatgctagcaaactgaattcaataacgcactgaaaacatcattcatcatgacgaagtggaatttatcccagggaagcaaggatgtctcaacatatgcaaataaattaatgtgacacatatgaacagaataaagaacaaaaaccatatgatcatttcaattgatgacaaaaacgcatttgatacagcttaacatcccttcataagaaaaactcaaaaaactaaaaaaccagcaatttcacctctaggaatatatacaaatgaaagaaaatcagtatattgaagtatatctgcactcctatatttattgcagcgctactcacaatagccaagatttggaagcaacctaagtgtccatcaacagacaaatggattaaaaaaaatgtggcttggtgtggtggctcatgcctgtaatcccagcactttgggaggccaaggtgggcagatcacctgaggttaggggttcaagaccagcctgaccaacatggagaaaccccatctctactaaaaatacaaaataagctggacattgtggtacatgcctgtaatcccagctactccagaagctgagggaggagaattgcttgaacctgggagatggaggttgcagtcagctgagatggccccattgcactccagcctgggcaagaagagtgaaactccatctcaaatatctatctatctatctatctatctatctatctatctatctatctatatagatatagatatagatatatagatatatatattatgatacatatacacaatggaggtctattcagccataaagaagaatgagatcctgtcatttgcaacaacctgaatggagctggaagttattatgttaagtgaaagaagccaggcacagaaagacaaatttcacgttaccactcacttgtgggagctaaaaatgaaaataattgaactcacagaaatagaaagtaggaagattgttaacagaagctgggaagggtagtgggggtgtggaggaggggaagtgtggatggttaatgggtacaaaaaaaagttagcaagaatgaataagatctcatatttgttaacataacagggtgactacagtgaaaaataatttgattatacatttttaaataactgaaagggtataattggattatttgtaacacaaagaataaatgtttgaggtgatggatactctatttaccctgatgtgattattatgcattgcatgcctgtatcagtgaatcacatgtaacgcataaatatatacagtatgtatctccaaaaattaaaaataaaaaataaattttaaaaagagcttgtattttattggagaagtcagctaaaaggtcttttatgatttgtcattttatttatattgtggttaagtgctatggaaagaagtagagaaggcacgcatgcacacttccaccagctggggaacattgaaggatgactttgttttacagaaatgaccacacattcagatttagaaatgttgagatgaaggagctaggtgtatagtaaaggtatactttactaggtccatgaagaatgcaaaggtgaatcagacacatggtttctgttttccagaaggagagagaagtcatctacataagcacagcacatagtggaaagcgctaagtgtcctacgagaggtcagatcatatccacagaaaaacagctctcttttacttgcagacttaagaaaggctttgagaggaacacagcgtatttactgaattttaaaaatacagccaggtgaggagaattccaacaatgtttcatctatacttgggatggcccatattctgaatttttcccctggactgcaaaatctgtcctaccgtaggtggtttctttaaatagtacaaaacccaacagacgaaatatgaataaataaaaaagaaacccttctctagtaatccagggaaccatcgccatctgctacccattacagagatcgatcggggagcgggggaatgcctgtcctgattgagctgtagctctacttgtggatttgccttagggcccagtatgggctattcttccctaaggaatgtaagaggctcctggagccctgttgtagataaagcaggtgctcatatctcacaataatacttcatccatttggcccactctacttagactttgttctttctgtttaattagaaaggttgtggagaaaaagaggatgatgcagtcaatttgatggcttatggcatgttaaagtaaaacagggagccaagtgaagccccattcagctctgctgtggtgacaggtgagtccccgtccaaatcctgtatcggatatcttgaacaaggatccatgaagactgcggattgcctggccttaatcctctctcctctgtaaggggtggagggagacaggctttagagcaagcttgtctaacccacagcccacaggccacatacagcccaggatagctttgaatgtggtccaacacaaattcataaactttctttaaacattataagatttttcttagacttatttttagttcatcagctattgttagtgttactgtattttatgtatggctcaagataatccttcttagagtgtgtcccagggaagccaaaagattggatacctctgcatagaaggggaaagctgcctccaatttttggtccccagtctgaaagaggaggctggttagtgaatggggtgggggcagtaggaagatggagagcaatgcagggaaggttcattgttaggtgcataagtgagtgtgttaaggttgggaaattctgtgccaggacatttgaccatcccaaaattttgtttgcaagggccatcgctcaaacagctacaaccccacagttctccttttccctggcctctactgtcttcttagctgtcttctgtcctgtagttctcaggacacttatctgtcattggatgggacttccagtattgggaatttaagaagactatggtatgaataaaaatatatagggagggatagaaggaacagacaacttttgagtaactattctgtgtcaaacaccctattagtacattttatatattttaaaatctacacacacacacacacacacacacacacacaccccagctgggaagccatcatgattcctattttataaacaagtaaacccagcaagtgatagaaattagatttaaacaaatgtttttcttctacttgttactatttaattctaagtagaaaatttaagatagctttgcctttgtttcccaaatataaagtcaattactatgttcattgttcctgataaaatgtctctgacagaatatcataatgagatgagctcttcaggcattagggataatctattagatattccctttggacatttaacttggctgtaagaggatatggaaaacatcgtgtctttcacatttcccctgcaagccagttcaacagctggcttcatgtgggtctagaagtggccaccaggttgttttaagaacagaaaagactgcagacagaaggttgtgatgaaataaactgtcctttaatcatggctgtggtcccagggtccaggaccctgagacatttagaacaaagttaagtgagtgcatttcccacacattctgctgcccatctgcctcaaacttgtcaccttcctgggccttcctagaagcactcactcacccttgcatgtttgggtcagtttctgctgctatagcaacccacacagctgcctgcaggggatcaagcctcccttctgtgaagtgcttcaaggttcttggaggaaataagatataaattccaagcatgagtatggaatgggcataaatcacaatgttgacatgcagtgggaggtagagatctactcaaagatgaactaaatataggcaagaacttgactcggcatcctgattgtgtgtctatcatatccactatctgggagcataccagcccattcagtttgaaaggggatcctttccacagagcaccacttgggccactctctgacttacctaaagcacacccaggggagaagaatgagaggagcaatgaaggcagtgcgagactcggtcacattcactaaaggcaccatgtacctcaaatgacaacctcctttgaagaactggccagcctgcaccaccatctctgggatgtgtgaacactggaatgctatgagttagctcctcacctttctttcctctctgggtatcccaccttcttccatcagaaaactatgtttaatactcactggatataagcattcctttctcactgccatccttctctcaacctgtatccccagtctctattcactgaccagtttgtaaagctctctcctttatttcatctaggtcctaaattccacgtacacatcattaaaaccttagaagatgattctcagaatattcttatgtgactaatttgagagacaacacatttgggctattctgccttctgtattttctgttcccatctccattccatgtacccattacccagtcctgctaggtgctaaggggttcagaagatgtggcttctgtcctccaggactcacagcttgggaggagggataacaagcatgtgcaaataactgactactaagtgaaaaaatgacaattcagtaagcaagctaaggctaaagtgataaaaggttcagaggagggaaggagaaccatggtctggggaagaagaccttgaaggtgagtctatcctgatgagcagataggatcagacatgagttatagtaggagcaggaggaacacagggagtcactactggaaaaagtaacatggaccaccaaacataaatgagtagtaattcacaggcgtgggcggcaaaagttgggtaatttattggtgaattcttctactatgtattgctatattgtataatttagtgatctcaaattcgctgcatattagaatcacatagggagttcaaaatcatgatgccaaggctgtaccccagaccaagtaaatcagaatctctgtaagttggacccaggcatcagtattttaaaaagctcctccattattacaaaatgcagtcaggggccagaataagtgctcgaaattaatacccctggggactctaaagtccagactaagcacctggggatcaggaggtctggggtggggcctgggattctccatttctaataaggttccaggtggtatcattgtcgctggtccccagccacactttgagtatgaaactcgaaatgagggtgctgtttaagcaaaatagctcagccattagtgtaccctgatggcaatttccttaaggggcagcactttgaattcacaaatggagctgcctgagatgcaattaatacaggtccacagatagataagcactaaatacccactgcttggtgacttggcctccctgctgatttgtggataagagacaatgattattgaatagcattgttactgaacagtatgtgaggattcaaggcgttgttacctcctgactccaatttgaagctcctcatagtaggaaatgaaaaaacgagtgggagagggggagtgaaagaatgtgtcatccactgaaattaacagacctccattattcctttgatctgaagctccacaaagacttgttttttaaggacagagatccaaccttccccgacagtagagaaagagacagatgattgttttggtgtcatcacaggttttgctcagcactgtaatgtcccacctaattttaaaaagtggtaaagagaatcttcaagtttcatatcaaatattttaaaatcccagcagaaattgcatattcattaaagaaaaacaagtttctttgctttgggatgaattgtatcaactcagaagctctaactggcagcacaaacatggagtggtgtgtgtgcatgtgtataaacacaaacatatacatttatatacacacacatacatgtacatataatctttcattaataacaagtaaggaagctttcaaaagtatctcaaagtataaaattcagccaggcaaaagcagcaagaggggatccttctaccctgtgcacgcacacgcagctatcagccatgatttttcaccttaaaacacatgcatggttgtgttttctcatccttcctggaaggtgaataaaattgagacccattattctccttccacaggccaagtaaccagcacaaggggtttagaggcttattcacaaccccacaacccatgtgctgccatttctcctcacatatgaagctgcaacattgtttggaatctgttgtttaggtttggggagaagccacttagaaattattcagtccagaatcacttgttttaaaactatagaaaccaagatccaaccaggttaatggcttggtcacactgaacctggtttgtatcagaacaaaggctggaatgttagttttctcctaaagagagtttaccagggctggaaattttttgcagattctctgctgtctgagatttcagcaaagggaataaaacttgtgatttgaatataacttgtctaatctatcactccagaaaattttccatcccttttcatatcccctcaggtatatttatgttcttcagccatagcatttggaaacagaaagcccactgcttgttgcaatagaatgtaaataacaagaaaatgcaactctctggattttccccaatcagatcaattttctgacaagtaacaaacttataaataatgtagatgctttaaacatatttaactcaaattaggatgttacactatttactctttgattgatggttttaaaatatgttattattagtgacaagatagaatgaacaatttatcttgtgagtgataaaaatcaaacatcaattccttgccctgattcttggttttcaaccacataaatatatttttgaaaccttttaaatctagaacggagagcttcaactggtctgttttgtttgtgatgcatgtaatacaacttgttacttgaaatttctttgcagttgtaaagtgaacttttgtaatattttgaatcacttttcagagtacacagactttttataggcttctcttataataataggttttactcaccaatcaaatataggagaaaccaccaaaatgctttaaagaacaatagaaggtttactcttttaaaaaaaattaaaaagaatttttttcttagagacagggtctcactctgtcacttaggctggagtgcggtggtgctcgcagcctccttctcctgggctcaaggtctcctgctgtcttagcctcctgagtagctgggactacaggtgagtgccaccacacctggctaatttaaaaaaaaaatttttttttttttttttttaaagaagaggactcagcatcttgcccaggttggtcttgaattcctaggctcaagtgacccttcccactatggcctcctggcctcccaaagtgctgggattataggcatgagccacagctccaggccaaaacgtttactcttataattatttccttatagatcctgagctttgagatcactactcctgtttctcaccactccagcaacagaagtatccgttaaggaaggtaatttgatttgctaaggcttgttattcacaagtgtctctgacataatactaactgaccaaactccagggctagaggctacatggggctaattctgaacaatctacggaaatatttctgacaatcacctagttatctgctctattcaataccagagaattgttataacttactcttcatctatggccctgcaacctacccactaatccctatcacctcgatatatggactggctttacactgttagcactgaactgaaacgtacaccgttctgcaagtccccatttgatttgagttgagcaggctttgaattcagttgtaaggcagaacttggcctttatttacagatggtttcatgaaccatctgcaaatgagggtcaagaataataaatggcccaacagttgatgatgtgatttcttaacaactctacttctctggggaaaaaagcacctgctattatcaagcttgatttgatctttgaggatgcagcacagaaagaataggtgcctcttcctttatgaaactgaggttcagaggaagaggaaagaattaagtttattaagctatataatagactgttaattgagtgactaatatatgcccagcaccttggccagttgcttggcatagaatgaaaaaagataacgagcaatctaccgggggtaacagagaagtaaacaaactattacaatccagtgtagaaggccattttctagctctttgaccctaggcaagttagctgtttcttcttttcctccattttttgtccataaaatgggcataatgtcctcctttagtattgttaccagataatcactactgaatgactcaatggattctttagttcttccagctattactttctttgggaaacacaaaagatgacttagcattagccatctccctcaaagaaccagtgagttgagaaaggcttcaatgtggaagctgtcaagaaaagcctttagtaagctgttttcaacaaagaaacatatgtgtgttttttaaaaatctaattgcactacagaaaattgccaagaccttgttgggaagagattactcctttaaatggttctttgtattggatcttgggaatttatgggtggttttgtctcaggtgtgtatcaaagtgaccacttctcccaacaccatccaccaccacatttaatctcagatccccctgaagaaagtagaggaagaacccaaacagaagatggtaaaggcaagctttccaggaagtcacaaatagctcaacaggtttaatccttcacatcagaaaattattcaaacaacacaaaatccccaagactcagtgaagtgacaagagaagatgaaaagagaaggcagatttttcgcaaaaggagtggtaggatggagggaagagaactgtatcaatggaagcttattgtgcagaccttgggacatactaaattcagtgtattcaacattggccggatctcagctaacacagtttcttgttcaaaacaccctgtttggaaaatgcctcctaagatactggaggttagaaacatgttaggtgggtaagagttgtagggctgtgtttgctggctgggagaaacccaagaaggaacatggtatccagagtttagaactggagggtggtcataaggaagaaagaaaaaggatttaatctatgttgctctagaaaggcaggggaacaaaaagaggtggatattacaaagagtcagagcagcttattgaaaaattgtccaaagaatgcagtagaaatggatgattgtgagaagtagtgagcctccttccctgaagaaatttaaacattccttaagtattctgtgaaagggatattgatttgttccatataacagaaaacaggtacatgtattgttcttgccatggtcagggggaagtaggacaaaataaacaaacaaaaaacacatacaggtgtacttgagggagcaaatttgggaaataaaacgagataacttttaaggtgatttcaaactaaaactttatggttttataaaaagctgaaggaagaaataaaagcagagactgtaagaggaagatgggaaaatgtataattaacaatattttctagcatttagtcagttatcaaagcaaaaattttaaaaaggttgacagcactcaaaatctggcactggatactgattttgttaaccagcactatttttccaaacttgactgtggcttcttcacaaattctcagtttgcgattagaatgacaacagatgaagttattcttgtctgtgtcgaaaaactcaaccttcccaggacatagaaggtggcatttgcaaaactcatttaactcctccgaattgggacacaactcattttgctttcccagatgaccatacagaaagtctagcagcctctctatcacatttaacacgaaggatccttttctggctttgaggaggacctgcaggtacctcaaactcaccacctgtaagtctgaacaaaggctcttatccagaaccctggcattattccagtgtctcttttcttcatgaaggcaccaattcccacccagaaaactgaagtcattctggacacatccctacctcctcaccttatgtgatccggtgttaaactgccattttacattttgaattggtttcaaattcaggcattatcgagtccagtctaatatatctcttctggatatttctctagctgttgaaacagtctccctgtatctcacttcccaccaatgtgtagccagaatggttattttaaaacacaaatctgaccatatatttccatgctcaaaacccttttatgacttcccattactagtacgtcaaacgccaaaatacttaacatggttatgccctccaagatccattctccaccctttccaccaaagcatgtgccccaagaggctgatctatatgggctccatcagtggatgaacttgctctctggcttttagttagatttgatcaatggaggtgaaggggcactggcaagagatcagagtggggaagaagagtcaggttggggtatgatatggttcggctgtgtctccacccaaatctcatcttgaattcccatgtgttgtgggagggacccggtgggaggtaattgaatcatgggggcaggtctttcctatgcggttctcatgatagtgaataagtctcgtgagatttgttggttttaaaaatgtgagtctccctgcacaagctctctttttgcctgctgtcatccgtgtaagacgtgacttgttcctccttgccttccaccatgattgtgaggtctctccagccaagtggaactgcaagtccattaaacctctttcttttttgtaaattgcccagtcttggctaagtctttatcagcagtgtgaaaatggactaatataggttctttattcttttctttcagttccctctctttagggtctgtatgggctccctttgtcctttgctcaaaggccactgctccaatcaggtggtcctgtccacacagctctctttccaggtttctaataatgacttcatctcttttgacttcagatgttaatggtatttcactcttactagccctgggaaactgaactacttcttacattttttgccttaccctgcccacatagtcttcaagcatcactctcttaaggaaaccatcctggactctcctgaaagaatacgatctccttattaaaagcttttataatgcctatactttcatagcactcagcataggataaatgattaattatgtaattgattgtcttgtgtctatctttcctgctaggatgagggcagggaacatctctgtcttagccatctccagatccctggatcatggacacataggtgctcagaagctacttgtcaaatgaaagccatgaaaagagtggggagaggaagaattagagaggaaggccaaggcaggaatgagacagccctggtcagagagacaagaaacatcacaagccaagggctcccacaccgcaaggtcaagtgagggcagcatcgagcgtcctctcactgtcatagaaaacctggggaggtatgatagcaaaacactgttttgtaggtctcattgtccaaagaggtatgatttgccaaagagaacatcttcaattaaatgcactttcaaaatgtgaggtctatacccaaaagagtaaattgttttctgtcttactacacaccaagccaccatcgtccatagcaacttcactgtatttcacataagtgttactttgagccattttcaaaagagaaatggtgctttttctttgagactcaaatgccatttttttgagacagaatcttactctgttgcccaggttggattgcagtggcaccaccatggcttactgtagccttgacctcctgggctcaagagatcctcctgcctcagcctcctgagtagctaagactacagatgtgtgccaccatgccaggctcattttttattatttgtagagatggggtctccctatgttgtctgagctggtctcagactcctgggctcaagcaattctcccacctcagcctcccaaaatgttgggattacaagcataagccactgcacctggcttttttttatgtcagtatttttttttttaaggaaaatcacatacttagtttcttattaaattttatcagttaattatcagttcacatcaaagaagagatgagttagagtgtcttatcccagactcttgtcaagtggagaagagtggccaacattggtcagggagattaggcaggactcaggcaagtttctcctttcaggaggttgtgagaaccaagaggaagaaggacactcagaaaaagcacactatggaagcagtaggtcaaagttaggaaatcagtccagaatagggttaccagttcaaaagatgagggacaaagtattgacacaaaaacaaaacaaatcaatcctcagataaataaacaatcaagatgacgaccacaggggagatgctgagtgagcaaatatggagcaggcagagggaaagaaaaaagagacaattcccaagggagaatataggatggtaccaatgccgtttatgtggctcttttgctgttggcttgcacaactgagaggcctatgggaggcaacagtaatgtgttcactgaccacaactcgtgagaccagggatgggcaaaggaggaagggcaaggagacgaggaatggagggggaggaaggcaaatgaatcacagccttcagctgcttcacaatcagtagctcctagagtttaaaaagacttccctgagagcctcccagggtgggtatgccatggcagaaccccttctgggatataagggatgtccttacactaaacataacctcatacagatcagtgcttttccaaccatgatgtgcatatcaatcatttaggtatctggttaatatgtagactattattcagtagatctgttggggaggcaggtgctgagattatgaattctaatacagtcccagtgataccatgttgctggtcactggactagatgttttgtgtcaaggttgtaaactaaggtcaaggtcatttcctaatgaatggctctgactatggcttctctctttaattcctcagctaccatagaagttgaaaattggttgttgagtggcagtgagtgtttatgaaattgttagaattcgtggctgacaataaacagattacacataaaaattcaggctatgagcttctcttggaaaataagaagatctggcaatgttgggccattgttttctcatggaaacaatggaaacaatccattggagcttagtggtggctgcctggctgcctccttttgatggggacactttctacacttgccaggctgaactacccttatatctaagtgatttcaatcttttacatcactggcctagtccctttttgcatttgtgtttgtgaattctgatatactagtttgaaccaagatgcaccccatttgttggaaggtgttttttcttccagtaaagtctttttagtagtcaatgcaattcttcatttcagagagagctatatcactgggattgaggatagaaacaagtccatacacacaaaaaatcacattttctgttgcaaatggccttgtccatttgcagataaggaaaggaaaaatgaattgttatacagaggcaaggttagtagatctacacttcacaatgtggatgcaatattctcagtggcaaaaatgaatcagctgaacatgttcaacaacaactgaagaatccagatggttatagaaagttcaagccacacaagttaaaatcaaataggtaatgtggagttaaacaggaaaaaaaaaaaagatagtgcatcccacctaagccatttcatacgaattggcacatttatcagtctctgacttgaaaacattaagaacaaaaggaaacattcagagagaacaacataaagctgaaataacccctttttcctctttgcaatctttggatgtgcaaactcacctactggtttgatttgcactgtttacttacatttttctattcctgttacatatttctctcccccacacacaggattttgagaagaaactcaggggaaaatgttttctttgcatacttgtttcatgatttttttgaaacagtatccataacaccaacagcatcctcacagaaagaacatttctgcctttgttacagaatgaagaggtttgaattaaaggcacagacaccaatgtgcccgcgagattggatcaggttcagctgtgtcccagccatcccagcagctctcacctggagctgaaaccctcatggagtgaaatgcctgggttccaccaccttcctggccccttcccacgtaacagctgaacaggcaggttctgctattgccctttaagcccttcatagcacctcccacaggcttttccggctcagttctgcagctgctcacctggatcagcccacgcaggcagtatctcgtgtattgaacattccctcttttttcttctttcatcaaaaattatcagtcatgaattccattcctttagggctttgatttctgagtttcgaggtgacaattgaatataaggtaaagagcatttgacttgaaatcagaaactcggagtttagctctaagcattcctatttagtagctacttaatctaggacgacttagcccctcagttgtcagtctcttcctctgcacaatgaaaacaataccaacctagagggctattatgcttacttcacagtaggtagctcaataaatggttgtttaatcttaaacggataaatggaacgttaacttcttaatgtgttctataaatttgtatttggttcttataggacacaacacacacttactgagaagctttatctgtgggcatttatgttccatggaagataaagggctcaggttttccttgtgcggacagatctttgaaggtagttgagtgacttgccatcttatagtctacaaactttggggtagggcttgcagcttcctcaacacacctccatttctactgggaaacatgtgggatgcagtggcccagggcaccaaatgcacaggcaagaggcctgatgatgaaatcaattgtatatttaaaccctgattttacttgggaaaatgtccccttttcctgtgtctttaataaaaatccatgatgaaaggccccaagtagggcctttcagggatgggagaaattcattaaaagagttctggatcctcagcatttagttgcctttgccccaattaattgagacactattttatttgaggatctgcttattttccctaacagggagatggtgagattctttacaatgatgtggcccagggcaggtatcatatgttattcttcttcatatcttcaacgcctaggtcagtgccaggcatgtaacaggtgccgaacaatttctttttaagaacatttataataaatgaaaaagaagccatactgctatagtagtactgaactatccccaattctgatcctgcataaactttccaatttaaatattacccttcatccttcattcatcaacccatatgcagatcaaacatgtaataccttttgcaggcctttgtgaagaggcctgcaatcaaagaaatcaatcggagtcagaggccttcatacagtgagaccccttacagcttcctcctggaaaactgctcccacgattgctcccactattgagtaaatgcccaatcattattcaatttatataataaatttactttttctctcatatgttgctgtaattcctaaccctaatagttgaaattttaaaaaggcttccaaatgaatattctaaactaagccccatttatttttgtaaagattctgataccacatatataatatatattatatatgagatattacatctcacatcttatatagtatataaagtaaatatatgtagagttatataagatgcatatatgtacatgtgtacatgtatgtgtctatatgtattttatatatatatattttttttcacatttgggttctttactggaattgtgaggcacacattccaagatttctgtccatataactatacacatggcaagtaatctgaaaaagcaaaacagatttctacctaggttcagggttgttctcttctattcttttcctgccaatcaaagtcagaactaggactatgaggctggggccacctgaggagaatacagttggctgccaatgcctccggcctcacttgctgaagaaagaacaaatgagcaggtgcagagttttattttttcattccatccaggtgtaccgaggtgtcaggaaaccaagctttcttcccagtataagcctccttgaaatgtctcctaggcctgtggtgtcctgacacaccctttataattgcaaagagccagtatccctccccctctccaccttctgttacttccagcaatctctctcagctgcccctcctaacctccccagccacctgtccttaaggagtgcctgtagtcttcagctgaaacaatggacagagtgctggaaagtgcctgtcttaggttctcacattcaaatcgcttttctgggtccagcccatattggctgtctagggatgggaataaccaatttactattttaaagctattgcccatgtgtagttcaattcttaagtattttccttaagccttatatggttaaaagaacaaagtccaaggcctgctatcccaacacttggggaggccaaggtaagaggaccacttgagccctagagttcgagaccagcctaggcaacatagtgagaccttgtctctacagaaaatagaaaaaattagccaagtgtggtggtacattagtaaatgcctgtagtcccagctgcttgggaggcagaagtgggaagatccctcaagtttaggaggtcaaggctgcagtgaggcgtgggcaacagtgagccacttcccccacacccccaaaaaagtccacattaccaggtataatctttgtaccctaaagaagtcccctctttaagtgcctctttaaaatccccctgacatctcctaactgcaaccccaggccaggtcctcacagcatgtggaaggaagacatacacatgaaccaagccagaaacccctcatgtgggcagacaggaggagttcaactgggacttccatttcttcatctcttttatgccatggaataaacacttcgaagtgctgagttttccagtctgtgctactctgaaatctcggtggtgcctgcgcaggtgcaggtgtaggtaggcagtctctggagacgtggtcatcaagagtaaagagaaagatctggaggtgagccctgatagtcctcccctgggcactcaggagggtggtgtattattgtggtgatgccacagaggtgagaaacctctccttcagctacctccccagaacttccttgaagcagccacgtctttacagagtccctcacacgagcctcgggcagaagtgacgggtagattcaggaatgccttggttacaaggctcagcagtggtggagagggaggaaggagaaaaatagccacatggtaacaactcagagcaagaagagaaagtggagagcccttgctgaggtgactttaatacacttgtagtccaatggacatcagacagaggtaaatgaggaaaagcctagcaaacacgttatttttttaaacagaaggtgtttacatttcagcaatccgactaggcagcatctaaaacaaaaacattattttaaagatggctttcaagaaaaaattttaaaagtaaacacaacttttaaaaagtgaacaaagggtagcagtcagtatctgttaaatttcacagaatttgatggatgggggagaagtgtatcaaactgcaattttgtcaggttcaaaactgggtagcactccccgtttttcttaatccagtagtttttttgcaggttaaaataagtcatcattggccgggcgcggtggctcacgcctgtaatcccagcacttcgggaggccgaggcgggcggatcacgaggtcaggagatcgagaccatcctggctaaagcggtgaaaccccatctctactaaaaatacaaaaaattagccgggcgtagtggcgggcacctgtagtcccagttacccgagaggctgaggcagaagaatggcgtgaaccagggaggcggagcttgcagtgagccgagatcaggccactgcactccagcctgggcgacagagcgagactccatctcaaaaaaaaaaaaaaaaaaaaaaagtcatcattatcaatagaaattgatggcgcaccctaaggagaagtcactgtaccaaagcctggcttctcagaggctcacaaaagctgcggaattcacgtttgacttccctcctttctacctagtcaaaaatcctctggccttaattttcttttcctgttgttttcccttccttgtgtctggtgacattttcttttcacttaccaattcctcccaaattttcttttcattcttagccaattttgtcttttggagccactaattggtctctgtgctacattttccaagatgattttctatttatttacctgttctttctacataaagctcaattatttctgataattcctattttaatatttgctgagtacaaacagagctcaagacaccaataacttggctgtctcctaagtctccattttatttaaaaatgagttcctgtgtggcccttatcccatatcaccagttgtaactttcgccaatgctacctatttttttctgtacaactttcaaattgtcatttttcccctcagtttcctgactatagtttgataattactctccacttcactcctccctagtcaacccaacaggctgatttagttctggtacccctacagataagtaaacccaacaacacataaatctgctctgagtttcagcatctgccttctttaggtgataaaaataatatgtctccctgggtatgtgattgatggaacaaagattgcttttagaaatcaacaaaccaataagcagaaaaaaaaaatgaaacaaaaacaaaggcccacgtttctgaaaagcaaggtcaagacaaaaatttgataagacttctgcacacatggagttagacaccttagaggccggttttcctgggtggagggattcaaacctgccattgcctcaagtttaagttcactaagaggccaggatggtgatggatagcacctctaaacctggtatacacatccccggggagtggggacacaagatgattttcatattttacatgttaattcaaaggatgacacagtttttagccagaaggcaagactaatgggttgtttgccctatcgaaaatgtgtattttcaataacattttcagcaccgtcagagcactgatgttatactggactcaacttgcaggaagcatattccctgaatatgtgacatttctaaactatataccttttataatacaaagaacttgaaggagcatggtcaggggaccagttttccagatcagcccagtcctctgacatcttagcactgcattcaccccttttggtgtgttctgtggtccagcagcatcctggttacctgagagtgtgttgaaaatgcagaatcccaggtcagagtaccaaccagaatctgcagattaacaagattcccaggtgattcgaatttgagaatttaagtttaactcaaagtttgagacgctttgcctattgaaggaaaataaacacccctgatggtcagaggtactagaacaacatttaaataatagctccattatttagttggcttctggagatggaagttctttccttgtcagaattgaagcccactgcagcgattgtttttctcatgttgatatggtttggctctgtgtccccacccaaatctcatgttgaattgtaattcccaatgttggggaaggtgattggattagggagggggatttctcccatgctgttctcatgatagtgagtgagttctcactagatctgatggtttaaaagggtatggcactccctcattcacacgctctctctccccttccaccatgtcaagaagttctctgcttcccctttgccttccaccatgattgttagtttcctgagacctctcagtcatgcttcctgttaagcctgcggaactgtgagtcaattaaacttcttttcttcataaattacccagtctcaggtagttctttatagcagtgtgagaatggactaacacacatgtcttcattgcccatttcattccctgtttgagtgtgtctggaaatttaacttcgtggaaagctctctttgggtaaaggtgaccggccaacatgggaaatgatggacagttgaggacagcctcatgtagttatttcctggctggaaaacaccaattaacatatttctcaaaactgaaacaaaaagtagctccttcaaattatttcaaattatgtaaataggctgaaacaaaactacaatgattgcttctgatgagaagagtctaatgtgttaaacacgaaaacaattaacttttatgaaaatggatttggtgagagaagtcagacattttacctaccacagagtatttagagacttcctcatgaatgacattcctagggactagagcagtcacccctcacatataacatcaaaggtaggatgccaggagagcctttcagtgtcaggtggctcaaaatcctcatgatacagccatgaaaaccaggacacagagtcagaaacagagtttacacaagagactaggcttcacgtggcttggtctaagcctccttcctgctcctgcccccagcccccccactgcctgggcccctacatacatcctccagacttgagtatatcactatttttctgttgaatttcttcagtgttcatttttttcctcctaatattatttaaaggctttgaagacaggagaggcatctttttctttattctagcctggtgattggcacatagttcacaccagttagaatggcaatcattaaaaagtcaggaaacaacaggtgctggaaaggatgtggagaaataggaacacttttacactgttggtgggactgttaactagttcaaccattgtggaagtcagtgtggcgattcctcagggatctagaactagaaataccatttgacccagccatcccattactgggtatatacccaaaggactataaatcattctgctataaagacacatgcacacgtatgtttattgcggcactattcacaatagctaagacttggaaccaacccaaatgtccaacaatgatagactggattaagaaaatgtggcacatatacaccatggaatactatgcagccataaaaaatgatgagttcatgtcctttgtagggacatggatgaaattggaaatcatcattctcagtaaactatcgtaaggacaaaaaaccaaacaccgcatgttctcactcatagatgggaattgaacaatgagaacacatggacacaggaaggggaacgtcacactctggggactgttgtggggtggggggaggggggagagatagcattaggagatatacctaatgctaaatgacaagttaatgggtgcagcacaccagcatggcacatgtatacatatgtaactaacctgcacattgtgcacatgtaccctaaaacttaaagtataataataataaaaaaaagaaaaaaatgatcctttgtggagtagaaaaagactgatataattttattcaagttatatatttctattttataaatgagtcaccttaccacatagccttatgtattcacctattgtacctggtaatggtgaaatgtatatttactgtataatttttacagttgtcctctaacaatgttgaaaataattttaatagctcattaaaattactttgagaaattaaaaaaaaatacttaggtgataggttggtctgtgcagtaaaccaccatgacacacgtttacctatgtaacaaacctgcacatcctgcacatgcacccctgaacttaaaataaaagttgggaataaaaaaagaaaaaaaaaaaaaagaaacacagttcagatcaatggctgctgatggccaggggaagggaaactaactgcaaatgggctccaaggagattctgggcataatgggaaggctctatattttgattgacatggtatttaaatgagatataagtttgttggaatgcctctaactgtacacttaaaatgggtatcttctattgtatgcaagttatacctcaataaagtttgttttaaaaggtaaaaaaagtagggaataccaccacagattaccttttttgtctcataatacatcattagaattgtgttgcccctgagtattctgaacacagtatgtgacacatcccttcaagggataagctacttgtccatgaataagctataatgtaagtatttttagagtaagaggttagcagaggtgaatgtacattttgtggccagagttctaaaatgtattgacccagttaattaaataacatcttcattgcctgagaaaaaaaatctgtctcttgtctcttttctaaaatgcctgagggaagaaatcatattctgggaggatatggttgattggaaatacagtgaccaagagagtagttatctttccttaattctcaagcaatccatcattggcaaaagcagcagcataaagtttaaaggactcattccagtgcccctatgactgaagcttactgcaactgttttttaataatcactggaggattgagatgagtcatagaaaatgttgaacagaagagatccccacctgccacaaaaagtcattagtaaattgaaaaaaaattagctgtaagaaaaggagccacttccctaatgataggacaaaatgataaaagcctaagtagcacgacaaaaagagaacaaagcttataattaacaccatctggcacatagcaggtatttaataataaatattcattgattgatatctagagattaaaaaatagtttctctgagtactctgagatgagacaaccattgaaaaccaaatctttttatttgtaatcaaagtagtgcaaatagaagatgagctctgccagccataaaattttggcaggataaaggcaggagcctttatccaaatataaatggtgaatgaagaaaatcttataaaacactttctgtaagaatactacttggagcatcaatagaacccattccaatgacctggtgcactgtcccctttgaattacaagcatttctgtttcaaatatatcccctatccatgctacattagcctatgagaaccaaaatttctctgactactctttaggaccaacactagtttcttttactatgattagattactctttagtgaatcatattttattcactaccgagggaaacggctcctgcctttatcctgccaaagttttatggctggcagagctcatcttctataacaaagtaaatcttggcttcaagtttgaatagcaaagaaaaaagacagctgagaaaataaaacgaattattttactgagtactttcccctcatagatgaagaaaatgcttttgacaatgacccatctatacttgggctattacttttgctcaccactgtagaatctgctactactgcattatttgtctctgtcaacttaatcatttagctaacattaatgtgtttgacaaatacttattgatgtctattttgtgccagacgctatatagagtagctaccatggccccatgcctattaagtcacagttatggctaggcttcccctcgttgcctgcacagatttttatttcttctttatgttcttctccttcgaatattgtccctgatagctgtttttgggtgctagttgttagtgggtggaggtgttattaaactattaacagatgataaccacatttctaaggacagcaactattctgggtgaggcactcgaggctgagtgtgaacaaaacagaaaaggtgctgccctttttgggagtttacagaccaagagaggaggcagtcatgacttgtggtgaggacactggagaaaacgacctgtcagtggtggagaaaaaactggagtgagatggagggaatgggaggaggaatctaggagagcatcactgaagctgcaatgagaaggataagaaggagaaagtaatgtgaagatctaggagaagagcattccatgcagggagagtggatggacacaggccttgaggctagaaggaagatgacatcttctgggatctgaaaggaagtggaataaagtgggcaaggggtgagagggatggatcagcacggagaggaaggcagtgccttgccagtggtggtaaggtatttggattttttctgaaatgcaagagaaggcatggaatttcaagcagcatgggaaggtgtgtggcctgttttttcagaaggttgctgtggctgctgagtggaagcgcagaggccacgaaggagaccattgccgtattccaagagaagaatgacagtgtattggcttcggggagggaggcagcagtgaggacgttaaggggaacagattagaaatatatttgaaggaagaaatctcctggagtcctgactcattgaattagggggtggaggagatggaaacaacaagtatgaccctcaagctctggcaacgagatggatggtggtccctgtaactgatatggtggagatacattagaggggagtgggtgatgatgaaaatgtccattggttatgttaggattgacaatgtctgagcctctcctcataatctaaaggttgtcgagctgcaccctgcttcagctcatcttctacctttccctgcctcataatgaaagtaagtgctttgccaacacccagttatcctaccaccaggcagttccaccctcacgccttattccctctgcttagaacacccattcttcatcacctggccaactccttctcattttttaaaacttaacttatgcatcaactccctaaggaagccttctttgcccncaagtctaagttaaataccaccccattgagcttccaaattctatatcactgtgttggccctggaatctgatagacatgagtttgaatccagactcttctacatttcagccatgaagtcttggaaaaattacttgacctctctacacttcagtgcctcatctgtaaaatgggcataatagtatctacttcattggctgatgtaaggaatagatgacatgaactaggtggtatgccagcacagatcaggggtctatacaagctagccctcctattcctgtccacatgtctgtctcctccactgggccaggcctccatgatagcagggactgtgccttgtctttttatatctgtggatcctaacacagttctgggcatacaggagacaaagcaaatacataacaaatgaaatccagactccttgggatggcacaaaatacctttactctcccaggagccctctctgtccttcatcaccccaggctgctgtacactcactcctctgccccaactcaccttactgtgacttcttaccccctagaagattctcaccttagacatcttcttctgggtttccttattgtcgttgtgtctgctacttaaggcctttcccagcctggcaacctttactgttactcgtcttccaaaataaacaaaaatataacctactctttgttcctgcacaatctctcccttactgtatccctcaaggatttaacctgggtaaatatgttttattataatacttcctattgtatgatagttacttgttatgtgtgtgctttcccttgtagcctgtcagctaaaaagtacagagcctgatatccatttctataacttgttctccaaaccatatcacacaaatagcaggtagttgtttaaataaacacttgagaaattgaagtgcacatgtcaaggccaagtgaggtagaagtaaatctgattctgacaatcagaaccagagaggaggtcctgaggatgtcagggagtgtgcccacttgttgggcccctttgaaagcgtggtattttggggactttggcacgactgtgaaactcaagagcaaggattagtcttacaactcatctcccgctcttcctcaaacccaacttctcctccttacaggatctaaacaaagttaactcatctctttttctggttcagcattctctggtcttcccttatgatgcagacagtacatttctacaaggcctgcctctctgcatgaatttatatctggggatgaagcagttgggatttctttactctcctctttgcttccacagttcctactgcctagaacatcctttcttctggccaagttctgatcattctctgcatgacccgtatgacctaattctgacctggagataagaactcatcacttctcactctttgttgccaagatatcttacatattcctgtgttaaatgacttttcatatgttattatcatctgttaacaaggcatgaatgctataaaagcagggtttatttccaatttatcttcataaatttcggtgcctattgaaatgcctggaacatattgcaaacacttagtaagcaatagataaatggatggattgataatggatggatgggtgaacagggagaatataaagccttacacccacaccactactaagttttctaagaagtcagcatgacttaaaaaaaaagaaaaagaaaaaggtttatcgctaaagaggccataggctacaattgacaaaaaatcttggctcacattgcttatttttctgctctgcttttttcattagatcaacagactgatgcctttgtggtctcaagatggctgcagcatcttgttccagccactacacagagacacaagagcctccagagactaaagggctatctcctctaggagagagaaaacctttcccagaagccctcaagagacatcccccaagtctcattggccagaactggagtacatgcctaatcacaatcactctctggcaagggaccaggtctcaccaatagggatttactattaaatgagagaaccatgtgtgtaacaggtgaatacctaaacagtgtaggagttctgttagcagcagggaggaagaaaggttgctgagtaggcctctgattcccaagtctaagttcccaaccagttcacctaattccatatacacacctaactaaggttgagtttgaactctactgctccttcctaggcctctgtagggcctgtaaagggatggagatagtgcttctgcttagctatcagccctcacttcatttcctgtgtctctcaattctccagctccacagctgctctcaccatcttctcaccagcaggctcagccttcttatgtgtcctcagtcatacttctgagccaggaagtgcttggctgtacccatccctttctaatatcatgtattcttactgtcaatatggtattgaatgtagtgccccgtgacaaacatgattctcttaagatgtgacaaagtgactcttgctacattcctgacccaggatatgtcctgaaggtcattgcttgtccttttgaatgtctaaggtgcagtcacccctctgtatccattgctcttttctgaacaagtcctactatatctttttcctaggttatctttgagccaaatccttcctttctgagtagtaatatatccccatgatctgtttgcctctatcactctccaactgtcaacggatgtgagacatcacttgaaattgtgctccagtgactctttaagcacttttcttgcctgccatctgttcagctactgcaatatgtccaggaactgccttgatgtcttagtctggttcggtgtcagcacatgaactgcccaactgagtttatttacatggcttctgttcctgaggattggatctgctccaggaaccctgtgttggttagtgactaggagctgtcacttgatgtttattggagcatgtgtcactgattcagaggatgaacttgatgacaacagaaggcccagctctcacacctcaacaggtaagcacactgtgccatgaattttaaatattttgcattgtctgaaatttagtgccagcttatgggtctttgtcaaaaatccacaaattccttagtttagattcccaagtcctatttagtatttattctgaaatgatcttactttgggtttaatctatgatctaatcatgggtaaagtagagagtctaccaagaaaagtggagcagatcttcattaccctttcctcacatgtcagagatacctcaaataccattagcaacctgtttctcacaaatgaaaatgtgtgtttatggccttaacctgaaagaaagagctttctacaatgttgccttcagttgcgcgtgtgactgtctcaatgagacccatgagaatctcaagtgtggatttgaggacaacctctgaccactctgactttaacgtctcattacaaagctattgcttaaatgtttaatgtgcaattttacaatagacaaatccacccttcagtagagtccatctaaatactttattaacctccttcccagccacacctcctgggaatccaaggcactgtggagctatcttttataaaggagattttctttcttgcagaaaataatggtgaccagtttgtgaactccagagaaagaaaacttggatcagagaaataaaagtggtaaaatagagcatgattttcattagggcaaattcagtcgcaacataaggctgtcttactttgaatatgccaagtgactctaaccagtattctgagtggtgcaactaaggccaaaaagtcatcgaaaccatcaatgacctgaacatcattaggtaataaacatattttttcttattctctacatgaactggctgtttgcatttttcccaagtaatttctttcatgaactattattacttctgtttagtttcatctcaggtcagtttgggcttcaaaattctcagattttgaactttataatggacaaagtttagagagaaaatggcttttgagtcttttctcaaaagcctaggttttgagtgtcaaagcaaaggccataaaggaccaggtcacaatgcataaatacagaagaataagacttcagccaagccaagttttcaagtcctctcacactcaggctcaagtccagatcagaggcagttttccaggctagaaggggagaagaaatgggggtaggaggagggtgaagagaagattttacatattggtgtgtccctgggctgggggttgggtgtatgaatgggaagataaaggccactcctcacatagacttggagcaatttgagagcacaggactaatgaattgttttctaggtggaccccagcaagggagcccacctcattgaggtcataggtggggcctaccttgggagaagtagagtagaaagaggggtgtgaggtgcccacacagatgagcctgaggcaacttttcccatacaccctggtgtgactcctggtagagagacaggcaagatagccagcagacccaagagggcttgcggtatacaaaccatgagaacacggtggtcatctgcttggatcaaggatgagaaagtatccaggatgtagatctagccttgaactgtagacagaggacaatgagagagcacatgcccccactttccaccaatactaccacacctggaatgtagactatccccaagaaaagggagagagaaacactttgaactgactgaggataactcgaattgactaagaaaaccttgagactgggcacagtggctaatacctataatcccagcactttgggacaccaaggtaggaggattgcttgaagccaggagttcaagaccagcctgggaaacatagcaagaccctgtgtctacaaaaaatagaaaaattagttgggtgtggtggtgcacacctgtagtcccagcttctcaggaggctgagatggaaggattgcctgaattcaggcatttgaggttatagtgagctatgattgcaccactgcactccagcctgggcaacagagtgagacctgtctgtaaagaaaataataataaaagaaaaaaaaaaagaaaaccttgaattgaaactaagaaagatttttggttttgcccccaggcataatggtgatttgagttgaaaaataaagttacatggcttatacacccaagtttgttgactgatttatgtgtgtgcctgtgtgtgtctgtgtgtttataaaatgtatagaaaaaaaagaaatacataaaaacccttttaaaaatctgggtggggaggtgataggtaagtagacccttggctgggtgcagtggctcatgcctgtaatcccagcagtttgggaggccgaggtgggcggatcacgaggtcaggagatcgagaccatcctggccaacatagtaaaaccctgtctctactaaaatacaaaaaattagctgggcgttgtggcaagcacctgtagtcccagctactcgggaggctgaggcaggggaatcacttgaacccaggaggcggaggttgcagtgagccaagatcccgccactgcactccagcctggcaacagagcaagactccatctcaaaaaaaaaaaaaaaaaaaagatacgtagactcttctacagagagattcatcaatgtgttcaatgtcacagaggtgacagagctgggaggtgaactaaggtcaaataacatgaccatgctgtttattctatctactcttcctctctagatggctaaagaaaatcccaggtaagtctcttgtggctaaggcataataaagacaatcagactgtgaattgtgttgtcacctgcactttgattgagatacattgattcaatctggccacagcccagttgaatccatttaagaaatgagaataattagcatactcagattcgaacacttgccgactcctctgggacacagaatgcaatccctgacaaaatcagcattaatatatgagacagccacacttcctgtccttttggtaaaataaaaatgaaaataaattctcttctttttctctgttcccaaaagagaaagcaatcgttgagaatcagctacctaaatgaaaatcttgctaatggttaaagcttctgcaatcaataatgtgaagcagcaaagtgaacaatagacccctaaagtcctaaaataaaaaggactcctgtcctttggggaattctaggaattactcaataagtaatattttgttcaaccccagaatcctagatttaaaaagctgtactattagtaaaattagatttgcattaacacttcaatgagcctaggaaaagtaatgttggagatgaagtcttttttcatggtctgcccaacaaagcccagggcaacgagtcctgtgagttaatgtccagcacagtacctggcatacacgagttcaggaactgctgaatgaatgaatgaataaatgaatgaagcaatgagccagataaaagctagaaggaaaataggattctgtaaactcattcaaaccataggcttccttttgatttcatggtcaccaaataagtctttgaatgactaatttgatttctcaggtataataattcagtgactggataaattgagtggatgcctcataaatactgccaacagtataacgttagtgtgtaagattatgggctttagagtaatagagacatgagttcaagtccttgctctgctatttgctaccatgtgacattgagcaagctacttagcctctctaagcgttaatttttttcaatggtaattgtaactgggccattttcagattttttttccagcttatctgttctttcccatgtgctgtcatttccctatttgaaaataatgacatgaaatatcaaacagttatgggttatgcaaacaacttcccatgttatagttaacggaaaatgcttttatagaaatccatacccttgtatatgttgtgttctttttttggaacctcccatttggctcattgaacttctaacaattctttaaaacctatgtgtctctctctctggaaagtttactctgttcctaactctctacctcctcctgacactaaatttagtctccccttgtcccacattcttctttgtacctgcttgtaataatttatcacctacttccttctatctatttgtttatttgtttatttctcttctagaatgggagttttctaaaagtaagaaccatgtcctctttgcctttatacactagcattgtgtcaagtgttcgattattcattaaacaaacatttactaagcatcggctacatagcagtcactattttagggatttggattcacagatgaacaagataaaatcctgacctcctagaatttatgctctagtgaaagcagatgtttagtaaacgttgaacaggtacagagcacacactcaatagagggctctgtggaagtaactaccccttctttcattgtttacctaaatttctggggtatttttttaaacaatagtgagaagattgaagatggagaaatctcttttctatttgttcttagttctcataatgttcaaaataaatgactatggtaggtaatatcacaaaagacgaatatctcacagttctgtgcttctgcatatgaaggcgagggtagttaattggctcataatcagttcttgagcaaagggctaacatgataatgggccagtaatgagatgactctcctgagctaggctgtcagctaatcacatctggtttgtaaagtattaatcagctctgagtcagtgggtagggaacattaagaatgcagttacttcctaaataaattatttcccactttctctgacaatcattactggtgtatttgaaagaattattttaatacactaagtagagcaaagctctaataatattctttgattaaaataccaagttacaatattttatattattaaagatttatagtactaataactcagtagacttcatgccacattaataatgtcaaaacagtcacatgttaagatttgttcttcaaggagcatgctttctagatctctttcgtcacgaaaacaacattttctgctccagtattttaattagtcctttaactggaattttctcttttggctcactgaaaaattagctcctttaattgttctattactcattatgttccaggtacatttagtgtgcttcctgttagtcatttgccttttccattttttactatgatgttctcacaggaattggaagcatttttatttttggaagacagcaggtagaataattaagattgaatcatagaaataaaggcttgattcagaattcactcaatacctaaaataagaacccatgtaatgagagttaaaaaaaaaaccaaaaaaaaaacccacaaaactctcacgaatggcagagctggagaagactgtcctgataatacgtgttcatcttgagtctcaaatatgtccagaataaagctctatgtacttggtttgtatagaaaacatattttccttattagcttattagttaatattacagtttcttctaatgtgctatcctatactaatgttttatatgcagctacagaaaacatgaccttctagcatttctgttggtggtttacttaattttcttttaaataagaattgtgttatggtagaaaattcaaaagtatgagaaaactatgaagtaagacagaatacccagtctcagtcaccccggcccgagattttaccatcagcaacagcagcagcagcagcaagaacgtatactcttactaaatatgtaagacgtgttcacatgctctgttaatattttacatgcattctctcatttaatccctataaaaaccctatgagaatgtatgatggatttttaattttttacatagtaacattttattccatgctttttggtgcatttccctttattacaggggttggaagaccaaaaactacatttcctagactctgttaccactgatatgctgcatgcaatttatattttgccatctagtgagatgctctattgctagacttgggagacaggaagaagtcagaagccattcttccttctgcagtagcagatatgtgggccttaacagaaattactcttacaatggcctctgaattcccttccagccacatgccacagggcttagggcagtaccggatagtcacaagatttcctacagtcctttgcctctggatggggtcattaattccctcactctctgggacactgatataaaatctagtggccacaccttgacttccccctctagccgttacaacggttttgtaacctcctaaatattattacatccttttctgtttgtgatacctagagtggatatgtttccctagtgaaacccttattgttatagttaaataataatattattcctgggctgtttttactccagcaaccaatcctccagttctctgaataccaaccaggtatccaacaattaaattcaattctggtactatctacctggagttagtgtcacattccacaaggtaaaggacccagtcccataagactgcctccattatagatgccagttccaagacccaggacacttgtagttctgacccactgtctagaaattggaagtccccaagacccacttttcagatcaaacattttctgcaatagctcacagaatttaggaaagtacgttacttacaatgacttgtttattataaaagatgcagctcaggaccagccaaatgaaagagatgcacaggagaaggcatgtgcaggtatgcagctttcatatcccctctggatataccaccttcctagtacactgatgtgtccttcagactgaagctctctgaaccccatcttttaggagtttttatggagtctccaagtcataggcttgattgggtaaatcactggccattggtgaatgaactcaatctccagcctgtctctctcccctctcctggggttgagtggtataaggtaagtggtgaagctgaaagttccaaccctctaatcatgcctttgtctttctgaagaccagtccccaccctgcagctctcgtggggcccagcgagtcacctcattactgtaaatgcaagtatagatgaaaggggattgttatgaataataatgagcttgtcatcactcctgtcaatcagaaatgattttgtcatcacttctatcacgcagaaaatgccaagggttttaagagttctgtgccagacaccagggaaaagaccaagtatatatttcccgttatcccataacttccatatcatagtgaaggacacaaagggattaaaaaacttaattaagaccacctggctagaaagtgttagcgctgaggtttgtgttacacatgctaaaaatctgagatacttttctatgaaagaaaagaattacaacaaagatgatgttgataattgtcacttatttacaaagttaatacattcttactagtcttactttattttatgatcaataaccacaataaaaataaggaagtccaaggtctaaatttcatttcatttcatttctccaaaaattttatttgaagcttttgccttcaggcaatgatattttctataataacatattcagggttaatctgtccttttgtttcccttaagccactgcctgaacaactagaccagtggttctcagtgtgctctctatacccacagcttcagtatctcctgggaatttgttagaaatgaaaactctcaggccccaccccagacttactgaatttgaagttacttactggaagtaagcctcaaccatttatgcctcaatgaacccttcaagtttgtttgcttgtttttatcactgtccacatccatgttgagatattttggtcctatccatgttctatccaagatgctatttctcagtcgggtttccatatggtgagtcagagcaagagcattgccatcaggactgtgttattgaagatgctgacaaagtccaacttctactaagagatcctggatatctctagattatgccatttaaagaagccgccaacttggtgagaagtagcaaagttatggattaactgttgcttcatgtagcataaaactgtatgagactaaaggaaggagagaagcattgctactttagacaaaaaaatgagagagagagatatatatatagccaaattattgttttgaaatgccaagaatgttggaggttagggctctgaagctgaagtaggactttcaatgagcaatgcattaggtagcatgtaaatggatcctgtgcataaattaattctggatttcccaaattacagccattcctctgttactgtcaattttcattaatatggctcagttttaaaattaagcatagtgatatttgtcctaattaataatgtttttgaaatcatagttcagtaggctagttatatgtttcttctagtaaaattaaaataaatgcatatttaataaaataagtccattaaaaacatcttccatacaattagtgatatgctttgataaacacaagattaatttatttaataaatgatcatacctccccattgggaaattccaggaaagaatgcagactgacaagagaatctaactgtattataaatgtataaaacacctcattaaaggggataggagaaaagctgacctaaaagattttggaaatgcagtctgtaagactaaagccaaagggaactacacattaagtactgtactgtagttgataaagtagttttccacagagatacaggttaaaaattctgatactactattcatgtgtattggagttaaacaattaagtaaatggcttctcacggttgcagtgaaaatttacagatcagcaaggggaggaggctagaatgtagattagattagagttggagacatcagcaagaactcatgtttaacttaatataggtatagctgcttacatatagaatgatttatagatatgtatatatatgcacattagtatacacacatatatttctttcctatgtcatctgagagggtctaaaagaaaccacccaagatcctggtttctaatctcattctccagtaaaaggaattaagcttctttggagaaatagctgttcctaacactgggtaggaaatatatagcataagcctggagtattttgtagtatcagaaagtaagaaagtgactctccccccaaaaaatcaccccattatgtcaaaggggcacagaaaccaatagaaggaaataccaacggccaaagctaaaatagctaaaatacctggagcaacaaaataaataatattggattattaatcaaaatataaaacaaacatccacaagtccacactgatataaataaagaattgtataaattaataaatggatggtaagagacaaatctctttatgcagaagatgtttcttaaatgcagatactccagaaggttaagtaggggaatgtaacttgtcactttgtaagtgtgggttatgcataatgacttccttacaaagagtacactatggaaagagggaaaaatcgtaactctacagtggagaaacctgacaaacactacctcagccaagtgatcaaggtcaacatcaatagtcataaattatgctgacagtatgtagtctttgatatgatgtgatgaaaatggcactttacgtcggtgatcttccccctaacccattgaaaccacctttgcaaaattatgactgagacagtgaaagagatctaacttaactgactccatctttcttctaacctccaagctgcccttgttcattcctgggcgtaggctgagttaactttgggagaaacttagcttatagtttatagtttaaacaaagatggtaacagccctttctcaaagcagacctccttcttgcctggagactagattgcctttgtaggactaacattagccacaagattagaaattatggtttaggagtcaagcagctagaggctacaagattctgaccctccttaaactgctcttaagatcagtgctggagatattttgcagaccctgcacttgatggatcagctggcaccacccagatcaataaactggctcatctgatcttggggccctacccaggaactgactcagctcaagaagacagttcgaactccctaggatttaatctctgaccaatcagcacacctggctcactggcttcccccaacccaccaagttatccttaaaaaactctgttcctccaatgctcagggagactgatctgagtaataataaaactccggtctcccacacagccggctctgcgtgaattactctttctctactgcaattcccctgtcttgatgaattggctctgtctaggcagtaggcaaggtgaacctcttgggtggttacaccataaccccagtctaatcatgaaaaaatatcatatgtatttcagtagagggccaatttacaatatatctgaccagtagtcctaaaagttatcaaagttatcaaaaacagaaaacgtctgagaaactgtcacagctaagaggagtctaaggagaaatgacagctaaatataaggtggtgttctgaatgggatcctgggacagaaaaagaacactaggtaaaaactaggaaagtcaaataaactatcaattaataatataccaaaatttagtttataactaagtacaatgtttgttcattagttataacaaatgtacaaaattagtgtaagatgttaataatcagtgaagctgtggggtgtgggagggtgcgatggggggtttgtttgtaatggaaactctttgtactatgtgctcaatttttccataaatctaaaactgttctaaaacataaaatatattatttaaaaattaaaataaatgcattacacctctccaaggaagcctgctgccttgttcctagaaggtcctcttcagatcatttcaataggactgctgtggagggctgtgccaatttatgccagtttaggaaagtgacgaggtgctgaaatttagacactactccacttccagaacccatgacccaggtaacaggctccaccagtaggaaagggacatcagtattagtcggggttttccacagagacagaccaataggaaggaaggatggatggatagatggatagatggatggatggatggatggatggatggatggatggatagatagatagatagatagatagatagatagatagatagatagatagacagacagatagatagatgatagatagatgagaggggatttattaggggaactggctctgtctgcaagctggagaccctggaatgcccatatcacagctctgtccaagtccaaaagcctcagaaatggaagccaataggcaaaggataaaggccttagaacccagcaggccactggtgtaagtcctgcagtccaagggcctaacagcctggagttttgatgtccaaaggtgggggaagagtgttccaacttcaggagagagaggaaattgggtttctgttttgttttggtttttggtttttggttctatctgggcctctaactgattgaattgtgcctgcccacagtgagagtggcagtcttccccactcagtccagtaactcacatgcaaatctcctctggaaacaccctcacagacaagccctagaaataatgctttatctgttctctaggtattccttaatccagttaagttgacacctaaaatgaatgatacagaaccttcgtgtgattgctatgtgctagttgtgcactagtttctcacggcatgcctaattatttcaagaatgaaggcatgagagtgaggagaaggatatttttttctgctgcacaattctttggatatgaatgcaagtgagagattcagcttaataactcctgacacttttaagcccctagaggcagaaatttggagcaaatgaccaaacttctgcttttatgattctatggatgcaggtgacgagcagctaataggattaatagtattaatactagctagcatcaattaaatatttactatgtcccagatactgataacatagaattcaaagtaatttttagccttgaacagtccagaatttttagtgccccccagctttaaagaattttaaagcacaaaaaaattcttgattttgctttaaagcctaactatgtgccagttgcatctcttgcttctggtgtcctcagacttccactttgctggtggaaaccgctgatacccctgtgctctttagaaccctgggcatatggccacttcacgcccctgtcaaagacatccctcgtggtgcctcttgattgggagactgactctcaaagaggctcttaattttgggactccaggctgtgttaattggagatgacagtcacccacacatagttgtttcccctgcaggtgtccttaactcaaaaccacttcagggctgaaaacaggataataaaatatctctctcttcacggccccatcgctactcagcagcctgcctaagccctgcttgcgattttctcatcagcgaaaaagcctcctgattccttttctctctgccttatctagatactaactagaacttaccattctgtgctctaatggttttaacaggcttcaaaaatctccactggtctagtagcttttttagttaaaataattaagagaaaaacagctttaaatgtttcctgaatcaggcaaatgaataatgattaagtctaattaagtggagaatcagaggaaagaggtatgagcctgggatagttctttataccaggtatttaccaagccaacatccagaagtttttaatgaggcaggcatgagatgatatttatctgaagtctgcccactaagaggacctgccttggatatggtagacagcccagaatgcagaggtaggcattcatttttaaatcagtccaagtctaatggccaattaacgcgcatttgttcaacttcaccatcctcttttgttgtttactgcttcaactttgaatgccagaagctttttaaaaagagcttgacctttacacaaaggagctttttcaatttaacctctaatttaatatgactgacatatgaaatatactagtttgatgttcaggcaataactcaaagaagagagagatgaggcttccagacaaaacacagcatagaaactgataaatgaaaaatactgatcactgagtattttttaaaaaccaagatgtttttataataagcttctctgattgcaaagcacttgcagatatttttattgatgaagtacagcagaaggctccagagaaagaaggaagagacatgtttgaataactagtttaaattgtcaccacaattttatctcttgggctgtactcattttaaagcaacactattttttaaggttcatttttactcctatgtcataattctagctcagcctaggagtctggaaagaacagaacactaaaatcatccttcatgaaaactttacagctgtgcactgtgacctttatgggactaaactcttaagcccacttaaagtctcagggtgccagtgatgtcaatgcctagaacattagggccgctgtgtattttttggaaattcttttcatcaaggtgccaaccttgagccatataggttttgaattttcatatcattccaggtgccaaagtttacatctattgtgtgacaggcacttggaataaaatgttgcagaagattaataaggtcctgcctcaaagaaattgcatttcaatggaggatgaaagaaaataaaaagaaaagatcactttggaaattgatcattgctgtgaataaaaacattgactgggaaagccttttgatagggtgatctgatgagttccttctacaagggggatactggagcagcaacctggatgaaaagaaagagacaggttagaacaaggaaaactacaggagtaaaggccctgaggcaggaatcagctctgagtttccaggaagagaaagaaggccagtgtggctggaaaatggcgagcataggccaaagtcaaaaggtaggcagggtgtaggtcatgtgcagcccagtaggccatggctagtagacagaatcttatttccaatatggtggaaaacaactggaggcagagaatacatgcatggatctggggacaacagtgtcagctgggggacaagtgtggaggctattacagaggttcaggcaaaagataatggcagcttaaactagagttggggaagttggggaggaaaggccggcagttcatttattcaaatacttatttagtgtcccctgagtgtcagatactttcctaggttctctttttttctccatttgaaagtttatcctgaacatttcaatcataaccctcacacagcacttaatacactgtattttcgtttacttaattgtttgtttctatgtctctctcacctgttaaattatgagctctctgagaacatgtataggatataatttatctatttccaaaacctagctcagtgcctggaatctagaggtctctcaatcaatgtgttttagagtttagttgaaaagatgaattgaattcaagacttctatctcacatcctcaggaaaaaagcctgtcatcaggccctgccaatttgaatacatttacctttttttttaaagtgctcaaataatttcttttcagggtggtgtggtttgctgcctgcctatcaaagataaaaacagcattgattaatataaacaaaattagaaaaatatttggctaaaatgtcttgctttctcagtcatttgctatcagctttcctccttaaacatagaaaaaggtgacaaaataaaaacttttttctcatcactgatggtattctttatgatgtccaagatgaagatatttctctcttcatattaaaccaggtaatgagtttaattgttttttccttcaaacgcgacatatttttaagccttttttccccctcaaatgccgtaatttaaatcatcagacaatgacaatgctgtggtacgctgaacaatgggcccacaaagatatgaggtcctaatccctggaacccataaatgttaccttatataaaatgagggactgtgcaggccaggcagggtggctcacgcctgcaatcccagcactttgggaggctgaggtgggcggatcatgaggtcaggagtttgagaccagcctggccaacatggtgaaaccccgtctctactaaaaatacaaaaaccacctgggtgtggtggcaggtgcctgtaatcccagctacttgggaggctgaggcaggagaattgcttgctactggaaggtgggggttgcagtgagctgaggttgcacctctgccccccagcctgggcaacaagagtgaaactccatctcaaaaaaaaaaaaaaaaaaaaagagggactttgcagatgtgattaggtgaaaaatcttgagataaggagatgaccctgaattattcaggtggaccctaaatgcaatcacttctatccttatgatgtacaggcagagagagacttgaatacacccacagagtgggggatatgaaggtgaagcaaagagggatttaaggatgttggctttgaagactagagtaatgcagtcataacatgaggaatgccagcggctgccagaagctggaagaagaaaacaagaacaagttttctccaacagcctctgggaaaaaagaagccctgctgataccttggtttggtgatactgactttggcctccagaactggaaaatcatatatttcgattgttttaaacttccacatttgtagtaatttgttacagcagctataagaaatgaatacaatcatgctgtatacattatagacctccttaggaactttgtccagtggtcctttcccctcagggtagggagcgctcccatctaggccacactccaggcacctgagacactgaaatctgccctgatggtcccaagactgcccctgtgtctccacgaacccctttcctaagtctgcgattgagccagagtggattagcagctagagatcagggcatctcaatcccactgcctctaagttagttgacactgaacttagtttcaagaattccaaattgaactagccttcttgatcattatgaacacatatttgtcaagacagatgtatagaacatgtttctttagctgtctggtgacttgccgtagaactttagatattcaggcccatgatatgcgggctctgtttgtgctcttatccgggaccccacaaatataagagccttgtggctaggtctgggctcagccaagccagcaaaactgatgccatcaccaaagacattcaaattgcaacccagtaaatctgtcagcctgccacaactgtcctcattaagatgcttcaagcccaatgtctggacctcaactggctgccctctggatttggaaactgggtttccaactattaatatttggttttctttttcttttcatgaaaattcccctcactaaatgtctggctgctgctctgaccatccagcaaatatcctctactaccaaatggttcagctgacccttcatgaacaaaaggtaactgaatgagaaaatggacttacaatgttcaaaggaaagaagaatgtcatctcttctttctttgaacagaggacggactggcaaagagtctctttttgaccaagcttttttttttttttttttttttgagacggagtctcgctctgtcgcccaggccggactgcggactgcagtggcgcaatctcggctcactgcaagctccgcttcctgggttcacgccattctcctgcctcagcctcccgagtagctgggactacaggcgcccgccaccgcgcccggctaattttttgtatttttagtagagacggggtttcaccttgttagccaggatggtctcgatctcctgacttcatgatccacccgcctcggcctcccaaagtgctgggattacaggcgtgagccaccgcgcccggcctgaccaagctttttaactgaacttcaagtctttttttttctagaccttaattttgcttcatgaataatactaataaaggtgcaaatatagactagtgaagaaaatttaaagcatgtttgaaacattataaacacatggtttatatatttgcataatattttaaattattatttataaatgcttctcacatctctttgccttatttggagcattgctattgtgttgttaagaacaaaaatagctacagtatcattctttatcatacatgatctagatgttttctttctctactcctgttttcctccctttagaaaaatgtatccatggttaacattaagaagaaaattagctgtaaaatcaaaaacacaacaatagtctaagagccacaacccactggaaaaggccacagcatcgaacagctaagctaaaaattccatgtctggatacttggttgaaattccctcgctcccactcagcaaagcatccccagatgccaaagattacgcattccactttataaggactaacgctgaatgctttttaaatacaaaattaaaaagcaagtcattcataaacttcagtactccatcagtaccacatcgttttgtcatatgttaacgctagagttgcggagaatggttacttgggataaaagatttcatctttagttgatttccaggacgaagtggttcaatagttgttctgcttcttacaattctcagagagtttaaattgcccttgaaattctcttaattggtccatgaggtacagttatcccggtttcaagagtatattcctatatggaaatctttgtacacactgaagtttgagaactgcgggctagactaaaatcaggaacaaaaggaaagtctatatgcagatgctcaggcacttaaatcactgtgcctttcggatatgattaaactctaccagtgagtagggggagaaatctaaattacgcaggctctcctgcagatactactccattttttgttataagattaagcctccatgatccttatttgcgaataggtttatcattgtaaaaataaaagctccgggcagacacagagaaagagacagagagaaagagactctaaagtcagcttcctggttaaatgcataatgccgtattgtcttgatacagcagttaaaagtggccctaaattcccgtggaagaggaagacaatgcaccaaaagggccttacaattctaacttcagttaaaatcatttattttgaactttgttctaactttcagtggaggctttaatgactccagtaaatgacaatgtgcttgaattttcactggcattttctattgtcacaagctttaagtttcttcagagccccaattctcttgcattatattttttaatacctgtaatcaaggccttagcccaggtcctaagcaaagctaacaaataattatctttcacaatagagctaaaaacaggaacctaattaattaaagcactaattgaacttcccattactgatacatttgttcctgctctgacataaacattaatcaaattcactgaataattcagctctccatttccctcacctgtgtagacaaatctgcctgctgtcctgtaatggtgaaagatgaaaatgttttatgatgtcatttggtaatatccttgttgagtactaataactgataatattgtatagtcaaatgggaagagggtacagagtaaaaacaaaatgctgttaaatatatatctatatatatatatatacatatataattatatatcttatatatttataacaaatatttgtctcttcttttaaaaaacaaacccatggaggaaagaaccttttgaaaaaattttaaagaatttcgcaagaacatctgcattttaatgaagtgggttatttagattgcaactgtatggggcagtagatttcctttaattatgtgattagataaatatttatgtattttttctctgttgaaatccaagcttcctgttgagtctaaatgctggctctcccctctccagctggcagaaccagttttcagggctgctggagaagatgcacatcagatgctgcttcaaggagataggaagtcattgttcatgggcagttctgttttggaagccaggctaactgggaccatagtttgatattgcagggcgagtcaagagtgcagctcttgctgctgtctaaacaggctcatgctgtgtggagaaaaggttgcagactctctgaaggcatcaccttctctaagtatctcaccttaaaaccaccaggaggaggttacctgcagatccacctaattgttggtggtggatgatatgatgcctagccttcatctccctttgaagatgtagaatttattccccccactgcggcaaagagggcccttagctctgagctccctatggggatttccttggttgaaggaagctatctttcctggagggcatgctgctttccagagacatccgatgctataaacatatgaagacctggtctcctgtgccagtttagacagctctgaagggccatcctgactccagagtccccactccttggggtcagctggggctttggtgaggggctgcattgtagttcaacttcctctgcaccctcctacctcccaccgcttctttccacaggtctgatcccaaaagcactccctaatctgtgcacaagaacctctgcttcagggttggcttccaagggagcctatctgtgagagggatgacaggaagtaaatagtatgacactactcaagatcgggcagacatggcatcaacaggcaaatgctgaaaggaagtgaaagaaagcagctgggggtacagggagaagcagaccacagcgaagactcaaatgaaataggcaatgtttgcctttctcctcagcactgcgttgagtggagtgtgattctgggccagggcctggggcatcctcagtgaggctgactgtaagaaaacctgttcaggccaacatggcagctggggagagggaagaaccagggctgggaggagaggactactgaaatcgcctttcagacacacatcaaactcttcagaaacaggttcagagttacttcaaagtagacttacttcaaagtgatgttgagagattttaaaataaaccacagagttctcagaaatctcctcagctgcagcagcagagtgcacaccaccccatccttatgtggaaagaaaatgagattccagagatctctctcattagcagagagaacagcagtccacctttatctctggtgatatggaaacaaactattcacaggcttctagaaacatctggcccccattccacctgttttgaattctcttttttatcgtattagccacaggcagcctagtaagtctccagatgagaccgtaagttttaggcaccgttgcctgataaagctgagacgatttaacacaagagatgctcactgtgctttcctgaccagtgaacaaagaaaaagcatagcggcctccataggtctgcccatctcaagggaggtaagggtgaacattgcaagaaagaaagaaggtaggagcaggagtatggcggcaacttaaaataatgagtgtagttataatacttggtgtgcttttgtccccaaaagccagcacaagtctggctgcctgcacagagccgcaactcttgaaagggtaccaggagagctatgtgaaaaggtttttttttttttttttaagttatccgttagatgctctgaaaagggctttgtactgagcttaaggcagctcagtttagcagtaggtagaacattgttaaaatggataaaaatgggagataagctttgctcccataatctgcttccaatggatatggaaaagaaaagaagtggctccttagagacatattgttgttgcacttattgggctcaaaggccttcctctggaattaatatttacctccaattacagtttcctggcgtaaggagtccctattgatgatcctattctgaaaagctttgatttattgagtaagtaggcaaatccactcacttaggtactccatcccagaaagcagccaatgaaaagattaaaatcagagcaggaggaatgctttatttacacttatttgaagttcagaccttcactcctctctccccactcccttggagcagaatggctccaagaagttttgctctgcttttagaaagctcacatctgcctccaggctgtagctctgccttactgtattttatgacctttggacagcttttctgcctccttgaaattgggatttggcctgcatgaaaaaaaaagtgtcgatgtatcactttgctcacactaaatgcattcaagttggtgaatagaggactagctggactttgcagagacatcaaacattgattaaaagctctgctttcttttccccatcccctatttttgcaaggcatacagagctccagtcccttctctggatggatgaaagaacaaggtggaattttatctcaagagaggaaaagagaggaagccaacagaggtctttccccttgcctaatgctgcacaagcattttgttctttcctaggatcctttaggacactctggctacagtaattgagtttcagagtggtggttatctagagggtgctgcagggatgaatgctgtgctgtgctgtgctgtagcaggccaggatctgattacccctcactgtagatggatgtggctgagtgactgagcatggaggggacttagtcctctggagctttaagctgtggccagccctagcctttctgggatcacatgcattaccagtgcttcccagagggatgtgtaatgctaatagatgtaagagaatgtcttcaaattaatgttctaatactttatataagaaggtgaagaaaaaggggataaagaaaaaaacatttttaataaagagagaaaaagttcttcacatttaactcaccagagactgcctgcccacaggggacggaccaaaaatatgtgcaatttttccctacaatcaagcatgtctggacatctcaggatttctctttctccttctagaagccaggagaagggcttgaggcccagccatctctagagttttggatcggcctttcagagatcaccatctaagagactctccagacaaaggtatggagaagagacaaccagctggtgtgattaaccacctgattccacagcaggggagaagtgagataagagggaatggaaaatatagcaaaacataaccatggcaatgataaaataaggaaaagtgttcttgcagccattctctgtttcagtaaaagtcccaatatggtaaccccagggtcaggatatgatgccttgggacttttattctgcttttatccctctgaacaggagtcaggtctatggctgggaagctcctgtcagtgaatattttctattctttctttgttatggttttccttttcaagctcccaaacacgattattttgccaggagagtgttttcttgtatgtgaaaggtttcagagattatttatgaaaagcatctgcagacaataattggggaatgtgttaaacctgccatcaacttgctttattgatgtgagagcctaggtgggtcccagtgcagaataggcttttccccatgtaagcgagctactgaaaaggctgtgttgctgaaaagggcaagtccaacagaggcagacgctcaagaggaaaggacaaggggaaagcagaggggtggaaactgagccaggagtcctgagacaaagcccatgatgataaaaacaaaagcttctggagatgttcaaaaggaaaactggttatcacagaaactcctccaaaaccgatcttttcaggcattaagccactttctccatgtatggtgaggagaaatgagagagtatgtatatcaaaagaacctcatttgggtggcaggattcccatctgtttagttttagtaaaagtctccccctgtcgcctaacatagcatttatttctgtcgtagagaaatccaaccttgcttgacttggtttatagcacccggacaaatggtaattatcagcctgtaattcccttgaggggagctgatgtttcaataaattataagagctgagcttgagtggtttatggcaccatcaaaaccttgatatggacatataatcttataaccacaacttgctaggaaataggtgtttgcacaataggtgatttaggagtctcctgtacctctcagagagcaggaggcctgccaggatgatccccagcagcccctaagccacctctcaatgaaatcaagacacttcctccctcaaaagtttgccaaggtttctccaagttgaacatatttggatctacactggtacacacatctataagacctggtgatcccccaaaatagttatgtgaccataggtattttcacaaatgcttaacatgttcacaggcatctcacagcaaggaggaggttcacacatcacatccaaggacacagagaaagagggggtgcctaaatctacaagcaaccttgatcactgtcatttaatattaaaatttataagatctcctgttttcaaaatgtgttagagccgtattagaagcaagagggaacaagacattccatagatatttattgtgaggctccattgtggccacatagaattgtccaattaaaaagtcagatgaaagatagaaatatggcaggattgctaaaaagcactgaaaatgaatattatttctttaatttatttataacttataccctctgacttccaaaaggattttgaagtcacttagaatacaatgccatgatatatataaatgccaaacatattgtattataaaatatattctattatagatatgtacaaatgcatgtgtgtgtgtgtgtgtctgtgtgtgatttttcaaatgtgtcagaggaaaagtgggagagaattatgttggcaatcaaaaagtaagttaaagcaacttggctctaaatttctccttaaacttcttggaaaaagaaaagaagataaacactacataattcttggggaaacagaggttccagtaagaaacttgctgtgtcatgccttaggcaatgcagtggtggctccaaggacctagtctctaaaatacagggccaggtaaattgccatttgtcaccagtcaggtcttccacctgtctgtacccacacgatgtcaaacaaatcactttcatccatagactgtctcatacagagaaaatatctaggggcgtttttgtgcatgtggtcacaaaacatgaaggccacaatcccataactagacctcaggtttcagaaaagaaaagctgatcttcacaacagtggtagtaactaggctttataaatccttgaaataaaccaattactgcttttgacaggcaaaggctttagcatgaaaggaaggttacctaccagtatcatttccacacactacctaaatctagtgccatgtttttagtgtcctttctaaaaagcatctatgccccaagctgcttcacaaactttggcatcaacagccatttcccttataatctttgtcctatgtatatgaaacatctgaatatcaatgtccaaagattttcaaaagtacttattttcaaaagtatttattggtcttccacatctgtgcataactgaatccagggcactctggagagaatgttgttttgttggatagataatctatttttataggaataaatgcagactggctgaaagtattaataggaatagtcacattataaaacttcatacaataaaatatgtttagacttcaatatcagctcaagagatctatctcaccaaatgtgtatgcttcttttaatttgacaataggaagtacacaatccattctttggtttatccaaagaagcacagagctgaatctaactgaagtgacaaattaatcctggtagttctactcctcttaattgatctcttaaatgcttctgtttttatttttaattgtgctgttactgtaaactgcctcaaagccttttagaaaacgcataaatcatgtataaacaaatgtataaaatacaaatactttctacaggggcttagataaattgtaagaggaaccagtaaattcatatcagagtacaagagaaattggagaattaaagttctttgcagtgtcccaggagctgccccttgtaaactatggtagagatgatccataaagccaaacaattcacaactcaaaccaataccagggggaattcagggtttgcttttcatttcaataatgtagatttgcgacacctaaatcaaagtcaccaggcagattcaaatgccttcaagttccaagtgggtaacataaataagtgatatgattaataacaacaggcaagtgggagctaggcattatggagaaatagaaaatgtgcctctccactatttaaatttaaatttttataaaacatgcttcaggccaaacaaaacacatctcctggccacagtcaatggctcaatggccattttgtgactcctgatctaaataatcagtctatttcactccactaaatttttgcaacagtggaactattggcatttggagtacaacaaatttttttactgggcaggactttcctgctcattgcaagtcaatggatgcctgactctcccaggtaccaaaaactataatatgcttcagaaaactaaaaatgtcgcctcttccaacatctcaaacgtgtgcctgccccacctacttatccagggtaagaactagtgtgtctaattccttggctaactcattctatctcttgacatcttcatgtttcacctcgtatttttgcttcctatgatttttaggatttaaggatagtatattacctgactctttcctttgtcttacactggattagaaaggggggtagtatgaagaggttggcaggaaatgtgaagataacgagataaggaggagaaggaaagatcaaaggcaagtcaatgcagtcactaggtaaaggaaacagccggaaaagtatgtggggagggaggctgaacccgtcatctttgttattgctaccaccacacagttttccaaagttgttctctttcatcctcttctatcagcttggaactttcccagaaagcccaatttgagaaactctacattttgtatctttggcctctaaataaaggtaaaatcccgtcttaatgactatcatttataacactcagttctacataatgaggccattgccaactcatggtcgatagcccacactaacccaaggttgctggtatggatataattagctcccttaaatgaaaatcttatgtagaacagatgtattctaaagtccttgttcatttaccagccaacctagttaatatgcctattatatagtgttacactcagcaatagcaattactttagaatgatcacatgttataatattcttagtaaatctggcatcaattctcaaaattgggcttttcttgttttctttttttgcatggagagttcttgctacctataggacttaatggctgtagacattccccctgatggggcagtggccctcacatttttaaggaaggtaggaaggtctcagagatttgaagacttgaagctgtttagagataaagttgttaacagagaagagaaaacaagccaaggtgggggtagtggtgtgggaatatgagtgtcagacaatttcaaaatagaggatagttagagataggtaaagcagaggagaagactcagactgggggaaagtcaggaagtgtaaatgattctaagtgtaatggttttggcagaagagccaagactagcagggctgaggggaacgtgagggagaaagagtcctctgaaccttcctctaagtcttagtataaagtgggcatttgaatgtaatgtctacatttaatgacagaaaagggaggattgcaaaatgagaggttactaacaagtttctacagcctcagaaattgactcaaggtaactggatattttcttttaaaatatctgtaccttttaataatgacagtatcaaaaccaatatttattagttatgttcttggcactgtgctgtcaactttacatggatttgttgttttcatcttctcaacagtgctatggacaccctcattttacagtgaagaaactaagaaggtgagggttaaataacttgtctgaagtcttgtgagtactaagggagagagaaaggatttacatgaaattatctgatctcattaggctccccagcctccttccccatctaacactgctatttcctggatgacagacctcttgagagctaccatgacatccccaagagtgggttcagaagccctgtgtgtcctgtcccctccccagatcagagttgttcaaatcaagatgggcacatggccccaagtcagtccactcagatttgcctcctcaagaatttgggattagtatagaaataaccggtcagtcagtctgattggtcttatttatttattttttctttttttgctgagaaactgtcaatgcaggcactatgcaatatctaccttattctcttcaggtctattgaaaggcagaaggagagaaacaagtggaaggacatagaacagcaatagaaagtgagccctctctaaatacttgatgggtgtccagatcctttgagtcctgtctgaggtccagctcttttcctgtcaccggatgcaatgagacctcctctatcctcataagaaatacccccgtttttttcaagctgctctgggttggtttccatcacttacaatgagagtcaactaaaataccatacagacctccaatgtatggtttctatctccccatatttattttactatcctaagcacttgtctctttcaacagcattttctgttatcttgcagttgagggaccctttcctaaatcccactgagatttaggcttagcataaaaacaatactgtacgcacaagcagacctccatcatctattagaaagactggcaacaaaataacccaaccaagcccactgaaagttggatctccgcacccaaatctcacacggtttattgtgaatattcatgagcactttcacataggaactgaacaaatgaataaacttagagccataccttcatttgaaattccccaaatagtttactatcttgagtttgatagtgttataaatatagagaatatagtaaacattggctttatggaaatggttaaaaaaataataaccgtaaatagctcttattattttgagatatgtcccatcaatacctaatttattgagagtttttggcatgaagggctgttgaattttgtcaaaggcctttgaatgggcaaaaactggaagcattccctttgaaaactggcacaagacagagatgccctctctcaccactcctattcagcatagtgttggaagttctggccagggcaatcaggtaggagaaagaaataaagggtattcaattaggaaaagaggaagtcaaattgtccctgtttgcggatgacatgattgtatagctagaaaaccccatcgtctcagcccaaaatctccttaagttgataagcaacttcagcaaagtctcaggtacaaaatcaatgtgcaaaaatcacaagcattcttatacaccagtaacagacagagagccaaatcatgagtgaactcccattcacaactgcttcaaagacaataaaatacctaggaatccaacttacaagggatgtgaaggacctcttcaaggagaactacaaaacactgctcaacaaaataaaagaggacacaaacaaatggaagaacattccatgctcacgaataggaatcatcaatatcgtgaaaatggccatactgcccaaggtaatttatagattcaatgccatccccatcaagctaccaatgactttcttcacagaattggaaaaaactactttaaagttcatatggaaccaaaaaggagcccgcattgccaagacaatcctaagccaaaagaacaaagctggaggcatcatgctacctgacttcaaactatactacaaggctacagtaaccaaaacagcatggtattggtatcaaaacagagacacagaccaatggaacagaacagagccctcagaaataataccacagatctacaaccatctgatctttgacaaacctgacaaaaacaggaaatggggaaaggattccctatttaataaatggtgctgggaaaactggctagccatatgtagaaagctgaaactgcatcccttccttacaccttatacaaaaattaattcaagatggattaacgacttaaatgttagacttaaaaccataaaaaccctagaagaaaacctaggcaataccattcaggacacaggcagaggcaaggacttcatgtctaaaacaccaaaagccatggcaacaaaagccaaaattggcaaatgggatctagttaaactaaagagcttctgcacagcaaaagaaactatcatcagagtgaacaggcaacctacagaatgggagaaaatttttgcaatctactcatctgacaaagggctaatatccagaatctacaatgaactcaaacaaatttaccagaaaaaaacaaacaaccccatcaaaaactgggcaaaggacatgaacagacacttctcaaaagaagacatttatgcagccaacagacatgaaaaaatcttcatcatcactggccatcagagaaatgcaaatcaaaaccacaatgagataccatctcataccagttagaatggcgatcattaaaaagtcaggaaacaacaggtgctagagaggatgtggagaaataggaacacttttacactgttggtgggactataaactagttcaaccattgtggaaaacagtgtggcgattcctcaatgatctagaaccagaaataccatttgatccagccatcccattgctgggtatacacccaaaggattataaatcatgctgctataaagacacatgcacacgtatgtttattgcagcactattcacaatagcaaagacatggaaccaacccaaatgtccatcaatgatagactggattaagaaaatgtggcatatatacaccatggaatactatgcagccataaagaaggatgggttcatgtcctttgtagggacatgaatgaagctggaaaccatcattctcagcaaactattgcaaggacaaaaaaccaaacaccgcatgttctcactcataggtgggaattgaacaatgagaacacttggacacaggaaggggaacatcacccactggggcctgtcgtggggttgggggagggggaagggatagcattaggagatatacctaatgtaaatgacgagttaatgggtgcagcacaccaacatggcacatgtatacatatgtaacaaacctgcacgttgtgcacatgtaccctagaacttaaagtataaaataataataataataaccaccaccatcatacctaatatctaaatacatcttttctttgtagaatggtatttgggttattttgatggcctaccaatttcattacaatagaattcaactggaatccttaacaaataattaaaatagcccctgatggaagattaacttctatattcccaaataaatctttgtaatgggttgttttagtagtgtggtgatcaccaaagcaatttccccaagtgaactatgttattttgagggagacagaggcaataaaactacctagaattattttctcaagtttatctgagcttgccagagcaattgatacacctgtgtatgaacacagcacaaggagattgtcttctccaccctcctcaattttcagacgaatatactgaggcctgaagaacaagagtcccacaatatatggccagtgtggcactgtcctctgattctgctggtctccctgatgtaaatccctttacatcctacccctttgagaaggctgtgtggctgacttttacaggtttcataaccttagaagttaagcttttcatggaagaactcagatcaactcagacaaacagtgggaagcaatcagcggaatgccaggcattgggaggggaacttctggtccaggctctgccattcactcaggtggggcctttggactccatttgtgaaaaagaggaggcgatggaactattggccataaggtcttcatgacatcctggagagtccttatatgtctgtagaagagccagctagccccactgcttaggcttttggtggcagcttctagtggctctcttacccagtgtgcagcactggaaatgcatatgttcttatgaccaaaggagttcatgaccctcttccttcagaacccaggtgacatgcatgagagtcaacccacaatggcattcaaatatctgtcagtaattatagcaagagccatttagttcacagccttagaaatttacatccctctacttttttcatcttgactttatcttatttactagactaggaacaaaggaattttgagttgacagaatccaatcatctgagttaaggtaaatgtcattataaacaaatcagttcaaataattgatgtgttattttgtcactgtgattttaaagaaaagcacaagccccttccagttctctttgataataaaataccatcatggatttgtacactccttggtttctggtatcaattcagcctcctgtgataggtgttactaaaaacctttgaagaacttgtttgtacatgccagattttctttaatataccaaccagtaagtaattctactctgcagtctttcaaaaaaagctagaaaaatgaagcaaaaagcaaaataaaatgtttgatttttttttttttcacatttctttttgtcataaaccatggaatatggctcaggatctccatctagtggaatctttaaggtgagaactctgttgtaaaatctcttagtcctggaaagttggggatagggccattaaataagacaaataattttttttctacacacatgcatttattgagagtctaatatgataagtgtgtgttgcttctttttaactaggagaatccatatttcctgggttaccattaataggtcagtctctactaaggtctccaaaccatgaaagaccatcacatgtcattttgtttacagggataactgggttcttccttcttctctttcccaagcttatattatagaatttcacttcttttttaaaaaatccactctgacagggtaaggaaagggaaaggaaaaacctcaggaaaagccatttttcttctagttgttaattctcatcaagagtctgatggagaaagttgttgaggtatataacatacaatgtgagctctctcagttatgtcaaagagtcataataagtcatgctgtctatgtcatgcccccacccatctgcttctcagggtgaacataccctatttctgtgcagcagactggagaaatttcaatgatagcgtatcactttccagatagaacacttctaattctttccgtccttggaatgtaatatatgcaattcaacttatattcccacaagcagtgccaactgctgccctcagagtaactttggaaaactattagatgcacagtcaccacctcatgtggccaccccagtgatctagaaaggctaagaattccttccctgaattttgtatcttttcttcattatgtctgggtttgtttgttggttttgaggcagggtcttgctctgttgcccaggctacagtgcagtggtgtgataatggctcattgtagctttgaactcaagtgattctcctattcagccttccaaataactgggactacatcatgcactaccatacccaactattttatttatttatttatttatctatctatcttttgtaaagatcgggtctcactatgtagaccagactggtttctaactcctggcctcaagagatcctcccactgtggccttccaaaatgctgggattataggtgcgagccaccaggcctggccatgtctggtattttgtttcatgtgtatgagtccatcaccaattaaaccaggaaacatttttctttcttccttccttcctttttgtttctctttctttccttccttccttccttccttccttcctttctttctttctctctttctctttctttctctctttctctttctttttctttctttctttccctctttttctctctttctttttctttctctctttctttctttccctctttttctttctttctctctttctttctttttctttctttctctctttctttctttcctccctccctcaggcccacccttcctccctttctctctctctttctttctctctttcttgacagggtttccctacgttgcccaggctggtcttgaactcctgggctcaagggattctcctgccttggcctcccaaagtgctaggattacaggcatgagccactgcacctggccaagattcctattttctaacttcttgggttcagatcgtatgagtgtcacactgtcgatatgctactagaaaagatggggaccatttcgagtgcagtagggatctcttgttatatttatgctgctcaataggctgtttattcattcactatatgtggtaaattaatgtttattaaattgaattaaataacacataatttatatactagttgttctttattgcaaaagaaagcatcaattgtcagatggtgctaaagactgctctctgtgacaaatataaattcgtgattgttgatataagtgaccaaaataatctatgcctcaaaatcacctgggccctgtacagtcaaattcaatattactttcattcataattaagtttttattcaggatatatggtgaaatgattgcattaacagccccacttcctcacccttccatccttttgccatgtacctttgcagtgtcctctctgactgtagcctcaggcatgtagcctgctttgtccaataggatgttagcagacttggcttaagcagaagcctaaaaaagccttgtaaatttttgctgtttctgtcacatctcagccaaaaccatgaaaacacatctgtccaggcaaacctgctagaagatgagaggcatgtggcccagtcacttatgtcataccaggcaaatattaggcacatgaatgagaccaactgatacaagaagaatcacccagcagagcaaagcctaaagccctgacctgcggactcttgagctgttattgtcttaagctactgagttctgtggcagtatgtcaagaagcattattgaggcaatagatacctgatagatgatgcatgctaagttctggaatagcatagaagttctgttggacaacagtgaactgtagacaaagacaaactacaatttagaatataggatagatgggagtcagagaaaacaaaggtgagaaagtgcctcatattgaggataagttgatatttgaagaaagaaaatttaaaaggatgtaaagtcagacaacaaggccagaataaatataaacatacttagctaatatgtatgaaaggaagaaagtcctgatgttggaggatggctaccacataagatctgctgtcatcacacatttaaatatagtgggggtgattgctttaaacattaaggaattgcaaatgtgactatttctacaactgggtatgttttcttagctgtaggtggagggtaggctggaaaagttttttttgtttttgagacacagtctcactgtgtcacccagactggagagcagtggcctgatcttgggtcactgcaacctctgtctcccaggttcaagtgattctcctgcctcagccttctgaatagttggaactacaggtgccaccaccttgcctggctaatttttaaaaaatatttttagtagagacggggtttccctatgttggccaggctggtctagaactcctgacctcaggtaatctgcctgccttggcctcccaaagtgctgggattacaagcataagccaccatgcccagccttagactgcaagagttctaaagctttttccacatgtcccataattctatcatttcagtatactagttattgttttgcaaatttattcttaaaaagtatggtaatcatggccacaattgctgtaagcaatgggaaagcagtatctgtatcattaataccactatgatctgagtgcgcttgagctagaattcatgagaattctgctaatattatggttatggtgtttataacacgtttcactcaggaggtatgcttcttgcctggacctctagatatttctgcagaggacagagtgaaacaactgaggttggactagagtaacatgtccaacttcctgcatgttattcatgccagggtgtctttgggcaggaccgggtaacaagagcttagaagatgaatttcccatactgagtaaatttatttaccccttccctatcatatacacagatgagatggcgctgcctttcaggtgatttggtttgtgaaacagtaagtgtctgtgtatgtgtgtgtgtgtgtgtgtgtgtgtgtgtgtgtgtgtttacagaaaattaacttcaagggccacattaactgtttgtttgtttggagggaggatagttccacggacaaatgtcttgttaacctcaactagaaagctctctctggccagtgactcacctcattcttatatacctgtagcatcacacctattgaaaagaacaccatagactccttggtttctattattttgtggtaaggaactttaagtacagtcttgtttcaatggaggtacaacagtttagaatttctttaatagcaagtgtgtttgtctatcctttacaacacaatttttttaaagttcaatacatgtttaaaaattgcctatttctttgaagaaatggctatttagatgcctaatttccaaccatctttatcacttcacgcatttctatgccctttttccatcttataacctaatgattataaagaggaagtttaatgatttagaattaactatacaggtagtaattatgtctctcacttcctcagaagttttttaataatcaaaatatattttcttgaagacagctggtgtaaatgctaatgtttgctttgctgttaaattttggacaaggcaattaaaggtaaatagatgacagctattgagatgctttccataactactccctttgcccttccagctagacttttccatctttctcaccactttcttttccttcttattcttcacactacctcctctcctcactgtcacacagggctcactgactgactgccagacacccagggtacacatatcaggggctcctcactctcatttattctcagcgagggggaaaatcagagaaacatttctacctaaaaataatgatgattcctgtgataataagtaatcaaaagaataccacttgttaagggggcactgcatatctggcattattctaagagtgtcatgtatattaatttatttaatcttcacaacaacctaccctgtattttatgcccaagttatagatgttgagaaagattcttctattttgtttaagggatgaaagtttcatctcttggtatgagatgtaccacatttccctgtgcatgtgctgtagtgatagaatacttcttacaaggcattggaactacaggggatatatctcatataacataggaggaacctgtttaagatatcaaagaattattttagagaaaataactcctaattacgcatacaataagacacatagattatgtataatatggctagagatgtacagtgctatatgcataataggtacctaacaggtgttgaacaaatgacatggcgtattagtgttctgtgcatgtgtcttcattcagcaaaatgtggagcccatgaagggaaatgggatttcttgggaaagtttccaatgctgacatcctaatgctatttaattgaaaacaagattagactcttgccactgtgcaacagtgtgtataaatgtttgtattttatcactttgacaagatgttttatattgacatatgaagagcaaaaatacaatcagatcttttagtctgtcataaaaggttaagcatggcatagtgtttaaaagcttgtttctactcaggttgccccatttgcatttgctatctttgtgactttggccgagttatcttttctgtgccttagtttcctcacttgtatggggagaagaaacaacatgatagcattatcaggattaaaggagataaacatatgtaaaatacttggcaagtgatacatagtattatagatagtaaatattattactgctcataattaaaaatgaaataaggagctgccaaagtagatgcaaataaaattgtattttgtaatcttaataatacaaaaagggtttctctaaccctcattacaatctaaactcgcctgggaccctgctctgggaaagcagtatctgtattatacgtttcctatacccagaaatctaacttctctttattccccttgatggattcatgtaatctctacccatgttaacattagccaaaacaagcccatattgaattcaatcgcataaccagtccagtctatttaatgttttattcttctgtccctaaagtattcctctgaaacaaaagcaaagccagaggtaagtacaagaaaacttgagaactgcttcttttccacactgttataaatgctctcttttgctattttctaagagtagtcctgtgccttccaaatctccaggaagctatgctaacttgtaattccatgtgagctaaagaataaaaagtccatacaaaaatacaagaatatagcagcaagttatgcccaatactgacctgaaacattaatatcccaggaaaaggtcaataanagtacagcaatttgtattagataaagaagagcatatgctctggctgctattcaaaaccttttctcctcagtgtgactcaaggatggatgatgtttacatgcagaatacactcccttagtgcagagataaaataggccaagggttgtgtggaatccctagggagctaactgcaactgtggttactttttctcttattcaagagacgtgtatctgaatgcaataagtatgagtgcttataaatagcctgaaatttattctaactatattaaaaatatgactaattctctcatgttgatactttatcattcataataaattgcttataccatttcatatttcttgaataggaggactcaacctcataaatatatgaattctccacaagttaatctagaatgtaatgcaatcccaatgaaaacacctagttctagatgatctgggtgaaagattgaacaggtaaatcctaactgaatactgaaaataaacaagcaagaataggcagaaaaattcttggaaaaaaggaagagaaaatagcaatattcctatcgatattaaaacatattttacaggcacaataattaagatagtaaggtactagtgcttaaaaaaagaaagacaatctataaaatagaatataactttcactaatggaccaaaataaatgtgtgaagatggtatacagcagagatggtatttcaaaccagtgggtaagggatggattattcaacaagtattcctaaaagaatatctgggtaacaatcttgtgttgggaggagtctgggggagggtaaggttagagccttacatcacaactatcctaccagaaattggagacagatcaaataatccaaacataaacaaacggacagataagtacttgaggaaaacaagaggaagatgtttaattttgattcagactgggagaagcctttctgagaaagatctaaaccctgcaaaacaaaggctcgataatgtcagttatatgaaagaaaatatcactgaaaaaaactctccataaacaaatgacaaaccaggaaatatatttgcaactctcatgacaaaagactaaactcatagacgtaagatgagctcctgcaacctaataggtaaagcacaaaaagacaaaagatatggaaaaggccatgcaccaaaaggaaatacaaatagctcctaaacaagtttaaagaaacctagatgacaggttgaaaggtgcagcaaaccaccatggcacagtatacctatgtaacaaacatgcacattcatgtatcctggaacttaaagtaaaataaaaaaaaaagatgctcagccttacagtaagagaaatgtaagtaaaaactacaatgagagattattttctacctatccaaatgacaaaggtgagattaaaaggtttgtaggagggaaaatgcctcccctgtagtgttctacttggagccttgattcagagcacacagtaatacgaagaagcaagggggcttcctaatgggcctgaattgtaggctgatgggaccatctgcagggaacagggaggagagtgttctctaaatagaaccgatgttcactgagtgccaactctttaagatgcagttattcattgtgatatttattttctttttgtgacattttgggcaagatcatgattcaactgtgtatagtgtatgatgttaaccgaagaaggaaggtgatggagtgcttagattagatgaagcctgcctttccagattaataatatcttgttagtcacacacacccacacatagacacacactctgaagtcacagagagaaggtgccatgggagaaaggttagaatctcaagctcaagtacagctaaagacgctgaatggggatttattctctacatttaactgtcctctttcagcctaacttgtcatttaaactgcaggaaacaccttaattatatctgggaattttactggaatttggagtacacttggttaataagacatgatttcctccgtgctcctgctgttgtccctcgtcacctttcttgctgggaaaggaatggagccctcccaggctcttttctcctcttgtcattacctggaggcaggaagcagaggacttcacctccttgtctcatttcccagggggtggagaagggaccacatctcattcttgaggggatggagaagaagaagaagtcccctttccaggtctcctccaggttgagcaggaggacagaggaggaaatgctcaggacggtcagagggtctgctgagctgcggctgggcagatgagtccaagacagcctcagagcatccccagaatgtgtgtgtgtgtgtgtgtgtgtgtgtgtgtgtgtattggacaatgggaggggggtgagcagaatgcttcccactgcctgagagtggcacagacatgccccagcctgctggcatccctggtgctactttgctgccaggacaagcaagggtgtagaagtgaagtgtgtggacacatgcttgaaatccagagtatatcacctctgtgaatcagcgtacccaactaacaaccaagagcagagggctctgtctgtgacaccttcgtgctccaaggcctccaggaattggacacggtcccagggaaagagacttagtttcagttacccagcatagtaaagcatcaaaacagaaaataattttagttacagaaaaaagtaaaaaaatttgttctagtacactcaggcttgaggattaaaatgtattcaagtacagatatttgggaaggaaggttctagttagaagtgcctcaaattccaggttaaatcatgtgtaattcatcatggaagcccagagactccatggatgtttctgagaattttctctgcctagatgaagcacaagctggtccgggaaggaactgtagccactaccatagcacttaaacactcttagataaataccgcagatgccttttcaccttaaagaagagacatgacagctattgtgaggtgctgattaataagctgagtggttgccccaagtccggtttgtgaaaaacaggtcacagagctgtgattggaaacgttatagacgctactgcccaaaagtcccacctggatgatgccaatttcagaagcgtcatatcagctctccatttccatctgcagatttcagagaacactgacaactttagaaaacatggaaattgggttgattttaactatgttaaggatgaaactttaagtggtcatggttggacacaggagaaaagaaataaccaaaatcagagctgaactgaatgagatgcaaaattctatacagaagatcattgttggaaatcatggtggagttgatagttttgttcagcctttaaaacattttttttgatgtatgcattgttcaaattactggtcccattagatcaataattgtattttgctagaggttgtatattaatcttcactgtaactagtgttgtggtgctaaacgtttaataagtggctttttggggggaaaagccctgatttgtagcatttgtaaatgtccatggagtaagtactcacacaatggccaatttcaagctagcaatgaggtctctggacatggagttgggaagagatgttcagtagcacattcttaagttgcatttccaccatatagctacaatacatgtacacaacctcaagagcatgattaataataaaatatagaaaaaaattgggaagctatgagtttttagtatttgttaactttgtttttaatataatttatatgttggtatgtttatgtaatctaatttttactttttctttttttttttttgaaatggggttttgcttttgttgcccaggctggagtgcaatggcgcgatcttggctcactgcaacctctgccccctgggttcaagcaattctcctgcctcagcctcccaagtagctgagattaaaggcatgctccaccatgcccagctaattttgtatgtttagtagagacggggtttcaccatgctggtcaggctggtctcgaactcctgacttcaggtgatctgcccacctcggcctcccaaagttctgggattataggcataagccaccacacctggccctaatttttaacaatggttgtgtttgatggcttgttcacaaagttcctgaaacattaaccattaggtctcatgagtggtacaagccatttccagtgtgaggttcattgcatccctgtctctagcatggtgattgccactcagtaggggttttacaaatgttggtgaattaattagttcattagttaatgagtgactattacagcctaaaagtttttcaaatgcaaatgcaataacagatgtgtttatttaacatcaaataaggggataatttaaaacaaaaagccaaaaatgcatataaggcaaaattctattttattgccctcaataaataatcagtgaactagtaaacatctatttatgtacttatgctactacgtagcatccatataattgaacagttggattttaaactcagcaagatataataactacaggccaaccacgtcacctttcgggacttgactcaactaaaagggatgtctgggaaaggtgtgtgggagcgcctttactgggcccagtgatatattttatttttgaagttgagtcagggctttccaggagtttgatttattattatgctacctaacttcataccggcactgagtactgtttagggacacaggttgaagccagacggcttgggttcaaatcccagctcttcccatttgccatgtgatgtttgggatggcacttactccttctgggcttcagtctcctcataggtaaattaaaggcaacaacactgcccacttcttagggtgcgtgtgaggactgactggatttgtatatgcagagtgcttagagcataagacagagtagcctggaagtgttagctcttacgttattatgtgtatcatatactataacttataacaaggaaaaaagtaagatgatgttggagaatcaaaagttgaactatacattgtaatatctttcaattctaaaaagttttatattatacatatattcattggcctatttggaacctttcaaattgacctggcactatctctacaagcccacaccacagctgggtgaaaatgacccagtgcgctcccctgcccctttgggaccctgtctgcttcgcctcaactgctcggttgcctcctccgttcattttctcctcagcttttctggcttctctaatcccacagtagtgctccaccacgaacctttgtcttcacctggcataggaataggtagcctggagttggatttcccaatcccactgctgatttttgtaatggactccaggtctcaagcctaacactagagagaaccgtacctgctgagatcagttagattagaaccccctctctaaggggatcaaaaaccacatacttaaagcctgaatatgcaagtatcagtagaccaaagatagaattttagccctgggaaaaccttaaattaacagaaaatgaagaggaaaaggattagactgaaatcagaattgatgagattaaatgaaccaatgcttatatagtgtttggcacttagtaggtattcagtaattaataccttacctgggacactggagaactgaataataaatagtttacttctttcatgcctcattactcatttattatctccaggaaaaattaagaggttacattagttaatacctaagtcaactctgtctggagaaattgtcatgtactttcccttagattgaagtttgattatacataaagccatatagccctgacatgagaaacaacagtcttactgagtcagtttaactgttaaaattgtgatttataaattttcccaccagagggcataatatcaaagccaatggctgctgagctgcagctggtgtaccgtgtaccatttaccgggtataattgtttcattctgttgattttggaacggaactttagcttcctaggtggtgacacttgccccctcctgtttaacatccattttaatataatccacacttcattcttcacatgtttagggtgtgcttgactctgaaatccgcaaataattttaccaaaatggcttttcacatctgcttattggaacagacctttttttaaagttccaacttttctttccaataggcaaagagattttaactttgaaacaatcttgaaatttaaacttacaataacacaccgtggtgcctttaagcaccgttaaaatctagcttcaactctacgtgggtgttagtggttaaaaagcactgggataattttaccaatttgttctgtgctatgaatctggcttatatgcaaatccttgggacattgaagaaatgtacgtgttcttatctttatcatgttctaaataaaatatattaccctcaaaatttaaaagtatatatttatatctaaaataccacaattttctggcctaatttatgattgttttctactttctccaaatatgtgtttatttaaaatattggcagtttggcaagattttaatacatataatagcaaactatgtactattcctactctgagaaaggaatagatagaaaggtcattattaacagtactcttaaactttgggccaacgatagaatttttccttcatctattcaaatcaaatcttattaagggcatttacccccagtactgtgatgttcttgttagtgatttaatggactgatacagtggagttataaactagtgagaaaatattaaatctaaagagcaaagcaggttatgaaaacaaactctaatgcactataaaatcaacactttcattctgagaaatataatttgtgatattctttcctcctttttttgaaagtgagagagtgggcaatatgccattcaaaataaaagctatttttataactgtatagagaaggatttttataaattgtctaattggagaaaatgactaaaattgaaattaataaaatgaaaaagactcaaatatgattagatattaatttaaaaatcaaggaaactctataaaggcaggttattttactagaacagaatcttttcaaccataagtaatgttctaaagcaatattttatttcccctttgacatgaatgtatttcacatataatcatggttggaatattgttttgatggaggagaatgtattcctacatatagttatttttaaaagattataaattgtgaacacttcctatcacaacaatttcatgaattcaattaggggaatggtacaatatattctcaatataaaaattatcttttgtgggggcaaataacttacatttgggagctgagtatctatctgacgaaagatatgttaatttggatcttagggagaacaaatagggtcactaaagggcattttgtggcctcttctctgaccccattctctctcagaaataccagtctggtgttggagtacccatcacagagattatgaatgaaaccccgttttactgggctcttcctgaaaaatagccatttttatttaaaactggacaatcagagttactcgaagatcagctgcctcaaataaacttagtccacatggaaagcttaagacaggaggaatggaggtaaaccaaattctaagtatcaaactctctcttctgcctgactccagtaaaataaaattttgatcaaagtttatctgagtcagaatccttttatgaaaaactcccttctagagaaaaaaatgccattccttaaaaatgtttaagtagttttctgattaacttgcatagaattaagatttgttctgagaaactattttctagtgaactatttatctacctagtgatctatctagtgaacttcaaactttttaaagctataacataaaaatgattttctaactattcttttttctaaatgaaatgcacctaccatgagaaaatctttgaattggcctccctcagcactgtttctcaaactctctgtggtgaagaggcattaattagtttattaattagtattattacttccaaactattgtcactgatacttttttttttttttttgaggcagagtctcgctctgtcacccaggctggagtgcagtggtgtgatctctgctcactgcaacctcagcctcccgggttcaagcaattctcctgtcttagcctcctaaatacctgggattacaggcacatgccaccacacctggctaatttttgtatttttagtagagacggggtttcaccatgttggtcaggctggtcttgaacttctgacctcatgatccacccgccttggcctcccaaactgctgggattacaggcatgagccaccacgcccggcccgtcactgatacttttataaaatgcaaaaaaaaaaaaaaagatgctgaatcaatggcactttttcattacaggatataaatccaaatcttttattattaaatttaacagacactgaatgatttcaatcactgtgtatgtttttaaatgcttattctcaggttttgtacttattcctcccaatctgggagcaccgagctcacagatcagcactggtctacagacaacactatcagtaagattgtactaatggcctttttccctttatggcaagactgtaacaaaactttgatgtatgctcctaactaaattgtctgaagtgtattaacactactcaaaatatgcttcaactatctaaatagctattaactactcaagatttaactgaagtcccatttagtttttggaattttaaaacaaatatcgcacagcaatttcactatggcgaatactggaattctttaatacaggggcaatgaaagcaaagacggttttcagaactgtgtatcagtgcctaagtacatcccttgtaatctcatacaactagaaggcaaggaggaagaaaaaaaaggagggttagaaatcatctggaaaccatgtaaaaaaatatctttataagtagctgtattttcctaatcagatatatagaaaattagttaaatttagaaggaaaaagagaaaaaccttcggggagatttatgtacctttttttccaagaggaaaaccaatttccttacaaaaagttattcattggaagtaaccaagctaaactgcacaccaatagaagtaatagatcagttgagtctaagaaaagattagagacccagctcctgaaaagtataatttgggctgcaattgagtgagttaatgctggttgacttgcatgctctgtgtatgtaattttctctagagattacccacattcaattctccaaacttctgtgaacagagtgctattaccaatgttagattctttcaatgacatgaatttatacctctagtgtcctaaacaatttcactggatttataataatttctggatcttgctccgggatgtcttatggggaagctttgtatcccagctggattaatgggcaattgaaataatctatgtttaaaaattcatatattatactgttattatttatcacatctatcataagtctcaaactttactgttgttttgaatgattaataggacagtcagtttcaagggagggtaggcctcttaactaagtatgaaaagcatttgcagagatctaagaattagaataaatgatattcttttccatttgacaaacattaactaatagtatttgaaaaagtaatttaacttctttaatcctcagttttttgggttttttgtttgtttgttttttgagatggagttttgttttgttgcccaggctggcgtgaagtggcacaatctcggctcactgcaacctcctcctcctgggttcaagcaatcctcctgcctcagcctctggagtagctgggattacaagtatgcaccacatgcctcgccaatttttgtatttttagtacagtcggggtttcaccatgttggccaggctgctcttgaacttctgacctcaggtgatccatccacttcggcctcccaaagtgctgggattacaagtgtgagccaccacactcggcctaatcctcagttttaaaatgcataaagtatgataattcctgcccctgcctatcccacatagttgtgaaatgcaaatatggtgagctatgtgaaaacacattgtgaagagggcaaagaactatgaaactattatattttgcccatatttctaacattagagtagacgtcctatgtatgcagtaaggtcttgaagtgaaattattttctaaagcatgtgccatccacaataaacactcacattcttgcaaatgagtctccatttactttgtacttttgaggataatgtttaccttttcctacactctcgatttctctgtgctgggataatgctgtaattgtatttaaccctgtggagctcagtggataacctgtaaaataatcaggttattgatttctgtagaagccttaagtttgtaacctagaatagatacctttttgctgcaaattaaaagtaacaccttcacaatcatgtaagcaatttatctacatatgttggaagacagatatttgcctggatagggaagagcccagtgaagggatgccaaattataaaaaatcaataggaaaaactagacacataagtagacctgaaacaaatagcatgtaagaccagatagcccaattagtaaaaggtgatgacgtggtggttagtatttggagggaagaagacgttggcacattacatgcaaccaaaaaaataatgaagatattatgatcataaccatggagaaaattagcttcagaaatagaattattgaatcactgtcaattggggattgatgatacaaaaggatcactcattaaaagtttttacgcaatcattgatttgtttataatgtagtttggacaccaaaagaggaaaaacaaacctcaagagggctaatattcattctgcaaaatggaagatataaggctaaacatggggagttaagaaagcattgtcctcataacacatattctaagggattggaaagggagccaccatatgatgctaatcagagggaaagtttcccaatggctgtctagtgtctgccttctacagtgttggggatgactggtcaaccaagatgctgccacgaaaactggccaagtggacagagtcctagattcagagagggactgagaatcttcaattttcatccagtgttggagcaatagggtcataggaaatatctggtatatactatttgctgtcaaagaaagaaattgtgtacaaaatttataacataaatattcttttttaaattaacatactttatattttttagttgttttaggcttacagaaaaattaagcagaaagtactcaaaatacatccccctgcctgaaattaagaagaaagtattgaaaatatgtccccatatactctctcaccccatttcctctattattaacatcttgcattaattagtgtggtacatgtgttacaatttataagccaatattggtacattattactaattaaaggccatagtttacattagggttcactatttgcattgcacattctatgtggacactcttgcttaagaatgctaagtttctaatgtaaattaacaaaatattctataagagtctattctagtaataaaaatacccataaaaatgccttgctaacctctttaatattctaacgaaaagttgggaattgtttcaataaaagtaaattggggaaatttaaatctttaaatgaggagttaggggagtaaatgaactcaacgcatgtaaagggcccagtagtggctggcacaaagtaaaggcacaataaatacaggcaattgttattattgtagtcaatatttctcatacgttgtagaacttatttgaggaggtaatataatacccatgacaagctgaagaaaagattgagtaagctacttcacaaactgctgcaacagaggttccaagaaaaatccagtaaaatgagaacaaattcacataggtgttgaaatcacgcttacatttttagaggaaacacatgcaaccccagggcaaatagtcaagaattagatgaaaataaagattgtaggaacctatataatctagcagcaatggccttcaagattacaattgttcatcaatgttaacgcaatgaggtcatcattcatgttcatgattctgttgataatgtagcttgccttttggaaactttctttacagctacctctcatggagtaggaatgagtaagtaagggtgaaatagagcaataaagcatcgcagagctgtagttaagattgacttctattccttttattggggccatttcatgttaatgacattagagtgtaattgctaaatcaggttgaacacctcccacactggaagcgctaaaatccttagaccagaacactggacatttctcactgtgatggttctaagtgcttaacagtattctaccaattatcttctttatgattcacatacaacatttgacccagatatgtgcacagacacagccatataaatcttgtggatatgaattatacaattaattcatttggtttagtttcattgacacctggataatatggattaaatgctggttaaaattatcttgattcctatagtctgtctgtactaaatcctaagtaaggtattaaatctctctactaggttgggagtgcaggatagcaaatttcagtgtgcttaggaattacctaaggctcttgttaatatgcagataaagattcaggagctctggggtgaggcttgaaactctgcatttctaacaggctcctggtgccactgatgctgttggtccaagggcgcaatttaaattgcaagagtaagtttagcttacaagttctggagtcagtcacactttggaaaagttgcctaagcaatttcagcctcagccttctcacttacaaaaagggcacaataagaattatctctctctactatttattgtgaagattaagtgagataatgaatgctgaatggtcagtttaaggccaagcacaccaaaaaaatgcacctaaagagctagctcttgttgtcacttttgttatttctactatctcttcgtcagtgaaaggatatgcattttacaaatctttttatgaactcattgattcatttggcaattaaaagttattgattaaaagcaaagaaatgataactaagaggctaagcctagcagggaacatacaaaaggatggaaagaaatagtacatgaggcccaaattgtgatatatttgacaatcaaagccaaaatgaacttatggctgaagctagaaaattgatagttgcccatgatggccttaattgctctaaatctgatccaaagccatattctgtcagttccatcattcaaaccgctctcagatccaaccgagtagcatccaggttcaaactttcataacctcctaactgttatcttgcttcctgccttggctaccttatatctattttcatcatctggtcagaacgaccgttaaaagcgcatatcctctgtttagcatcctacaacctacagagtaggatgcaggctacaggatgctaaacagaggatatgtgcttttgaaagtccaaactgcagaacacaggtctcaagtactgagctgtcattgccctccattccatctttatctcctactccctcctacccatactctggcctcctggaacaacaggcaacactgaggctctacctcgctgctgccctcccccttgccttccctctgcctggattccttctctcatatctttacctggttccctctttttgaaataaacttaaggtctcagatgaggagtcatttccccagaggcgtctcctggccccctaagtgtggtctcgcagtcctaccctggcacagcacttactgacttaccacttgatcaataggacaataggtaaagtatggaatattcacatatttgtatgttatcaacctaaaatggattaactacagctaaaactataacatggatgaatgttataaaaatcataaatggggaaaaatgaaatgtaacactattttcataaagctctaaagcacatcaaaaaactgtaataaaattcagaataagatttacttctgggggtggaaaggaaaagagaatagagaagagcaaacaattatgtttgacagttttggtaatattgtagtttatagtttgctgaaagattcatgaattttcatttttaaattactctccaaggcccgggaaaggtgtaataaaggccatagggcatagcttcttaaacttacctctcttcaactgttttagaaaagtaaataagatgccaatatcaagctttcaccatccccaaagctctatcctttcccaaagcaccagcaccagccagacacacacagatgcaaaccagacttcacacaattgccactgataagaaaaatgcagccacggaagagattccctcagcagagatgttgctgcaattacagctaatatggccacacctccacattctctgcatcactaatggtaaaaagaccaactgaagtgatcaacttaaataaaactttcccgtagttccccattccagctgagcaggggtcaagtttccgtgaataccctttgctttagtaccataaaaacttagtgagtcatcctatctccctttcttgtaggtttatgtattttcccacacaaattttatacccagagaacattataaaatagttctaaatataccacttaagtcaaaacgggaggcattcactataaactggttctggaatgtcagtatgtctaatggaagaggccagtgagttagctcttctatggtcaacttgatactctggcatgtttcatttttgtaggcagaggtttcacatcaggttccaagtcttattttcttttctttcttaaaaatttgtaattttttttttttttttgagaatgggggttttaccatgttgccctggctggtctctaactcctgggctcaagtgctccacctgcctcagcctcccgaagtgctgggattacaggcatgaatcaccaaacccagtcctgagtcatattttctaatgcaagttcttaccttgatatctctgaagatattttatagtcccttcttatggtagattatttgcaaagatggctactgtgatggaataaatgcttgtgtcaccccaaaattatactgaaatcctaacacccaagttgattgtattaggaggtaggacctttgggaagtaattaggttataagccctcatgagtgagatgagtgcccttataaaaaggatgccagagagctctctcatcttctttccaccatgtgaagatacactagaaattgttcatctgcaatcgtgaagagggccctcaccagaaccttaccataccagcaccctgatctaggacttctagactccagagctgtgagaaataaatatctattgtttataagacgccagtctatgatactttgttatagcagcctgaattaagacagctacaataatccttcccctccctgtatgcctacccttttgcaatgtgacattattatacttcccagcaagaggtgaagcctatttccctatgtattgaatctcagctgcccttgtgataatttgaccaatacaaggcagtgagagcaatgttgtctggcttctgagactggacctcaagaggccttgcatttctgtccccactctcttggaatgctgacctgtgagcaccatatgaagaagccactagggaatgagaagctacatggattaaaaccccacctgtgccccccagaacaatcagccaacagtcagaaccaatcaccagacaggtgagtgggcccatcttagaccatccatcccagtcaaggaactggatgaatgtggtcacatgggtgacctcagatgagaaccacagaactgcccagctgagcccagcctaaattgttgagccacagaattgtgagctattaaaacaaccgttgtcttaagcccattatgttttgggggtagtttgtgacatagaaataggtaactgatatactcccctgatttttttttacctcttatctgaatggagttgatgtgtgtgagcgtgtgtgtgtagaagcagagtcacatttactgtaacttggttggagcaaaatccatcagattttggtcaaatcaagaaaaaaatgactatgtctgagggtactgaagaataaaggtgagctgagtaattctaagacttgaatttttcttttttttttttttttttttttttttttggaaacggagtttcgctttgtcccccaagctggagtgcagtggcgcgatctcgactcactgcaagctccgcctcccgggttcacgccattctcctgcctcagcctcccatgtagctgggactacaggcacgcgccaccatgcccggctaatttttgtatttttagtagagacggggtttcaccgtgttagccaggatggtctcgatctcctgacctcgtgatccgcccgtctcggcctcccaaagtgctgggattacaggcgtgagccaccgcgcccggccaacttgaatttttcatttaaaaggaatcccatatttggaatccttaggataggttgtttaataagaagacttctcagataaattctccttcagaatagagtcctcttcaattattcttacacatttttcttatgttattaggcatttttcttttttaccacaacaatcttacatatcatttttcaacatttcctaatttggagttagtatttgttccccttttttattccctcgggacttgcttcattttctctcccctgtgctgttattcttactgcaacatcttcgaggttgtgataggcagctagattggtgaatgatacacgggctcacacagctctgacggcttcacctctttcacctctaaactacatctctgatgatctccacagtcctctccattctaccttttgtttctttttcccaaaacttcactctcctctctgctgccagaaatacagcccgtgcatgctgtgatatgcatatgagaaaccacactgctatgcagcttgggttgtacttgacagattagagattattttttcttatttggctgtgtcagggcagcagtgtatttatttttctctttgacaccagtgacagctataactgtgcccactcagaatccagagagtaaatgaatgcacagaggaagcatggggtcttccagcctaactcaacacagcctccctaagctctgctgttttgcagctggctgaaaacggaatcacagagagcagcagcccagacgtaggctccaggggcagtgaagaagacatggtttggaaagaagggaagggagaggggagaaacaagagagaaggtgaagacagctgggaaaagagaatgaaaatatagtggctctgcagctgataagaactgaccaggaatactggcgacatcactcttggcactttttcctctctgctgctgcctgccaacccgagttgttcttattaaaacacacagacaaaaacaacagaagaatcagagtttcccagaaatggaagtaagcaacataatcagagttttataaatctactaaatagctcccatcatttgttgtctctcttattttctttttaatataattgatacatgcaagagaatatatagacgatatacacaattataaatcatcataatattttgaatacctagaaacataccccaacccatgagccagaacattatcaatcatttgtctttatttgtttcttttcattccattcttttgcctctcccccagaaataatcataccattgaattttgttttaattcccctgcttactacatacatgcatatatacctttacacctccatacatgcttgcatgcttaaacaaaattgttttttcttggtcatctgtgaacattttgaaaagataccatattacatgtgatattacaggacttgatttgtttattttacattgtttttgaaatttatccatgtcatcatagatgactttatttcactgtttttcactgctgtgtaatattatgttatgtgaatttatttgcctattctgttaatagaatctgagtgtttccaagtttttgctattgtgaagtgttgctacaaatatccttatacatgtctccttagtgctcatatgtaagtgggtccgtaagaaaaatacttagaaatagttataaggtatacaaatacaaatgaattatataagaatatatttataaatgtaaatatatatactcataaatatatatattggagtaaatttatatgaaacagtaaagaactacagtaataacagacaaggtactcctgaagaagaagatcctctctgtcttatcctacaagatatacagacttattatgaagttaaaataattgaaagtatggtattggtgcagggatagattataaaccaataaaataaaattaaaagtctagaaacagacaccacaatatattatagaagaggtggtgtagatccggagaaaaggcagggccatacaataagtggtattagtgtaattagttatccattggaggaaaaataattaattggatgttaactttgtatcatataaaaaatgagttccaggaaatgaattcactgtaaagggcacaactttaaaacactttagaagagaatgtctttctgactttgaggtaggggaggacttattaacaaaatacaaaaattccaaccacacaggaaaatatttataaatttgacagcattaaaatcaagaacttctattcactaaaagacatcatgtatgaactgggcatggtggctcacgcctgtaatcccagcactttgggaggccaaggtgggtggatcacctgaggtcaggagttagagaccagcctggccaacatggttaaaccccatctctactaaaactatgaaattagctgggtgtagtggtacatgcctgtaaatcccagctacttgggaagctgaggcaagagaattgcttgaacctgggaggtggaggttgcagtgaggtgagatcacgccattgcactccagcctgggcgacagagtgagactccatcaaaaaaaaaaaaaaaaaaaagacatcatctctgatgatgtatacttcatacatgcataagcatgtatgaagtaaaagtataagaggcaaactaagaaaaaatatttgcaaaataaatgagtatagattgttatgaagaacatataaagaactctgccaaattaatgaaaatatgacaagacaactcaatagaaaaatggacaaaaagcttgaaaaggtatcatacaaaaatgtaaacaactttattaacaaccaaggaaataccaaagaagaaaataaaatgttatttcatacttactagattggcaaaaattaagagggaaaattgataccagtactttggaaaacaatttggcatattttgaaaaaataaattcatttctcgactctaaaactcagcacatccactgttaggtatagatacaagacggccaccaagtctgggaacacagataggtacataataagtagtttattgttattacctcacagtacatggtaaaatcatagcatgcatatctccatactttacggccaccctgagtgcatcctagagaaacctttagttctagctaaacaaggagatatgtaaaattctcaccgtcctgactttctctttgcccaggctcttgaaaaacatactaattctgtgcttttgtggattgcagcttcctagagaatctgatgaaatgggatcaatgcagactgtctcccatgaaaaattctctgcttccctgaaatccttctatgtaccatctcagggtcactcttccctgggttagaaaccctgttctaaatcattctctttccagggttagagcttaaggaaggcactgaggtacagattggcctccatctatgaaggacacatcctcaggtttgggttctagacaagtaaatgtgtcctgtcatccaggtttagaagtcagcattttggggctactgagactcaccatatctatcctaattaagaacaggttccagaacctgttccaagggcacttaggtctcaaggtccccagttgagcaggcacagtggcacacaagagggcagagggagagtgtccacacagccccctcactcctatgcctcatggacagatgggtagaggtgtcaggcacagtcctatgctgtgtatattcaagaagcccaatgagaaatcaatacttctcaagaatgtttatatgaataatgtaaacaacctcataatatttataaatccatgttttcctgagtgagttaccgagtccagcattctagctgatatggtttggctgtgtccctaccccaaatctcatgttgaatagtaatctgaattataatccccatatgttaggggagggaccttgtgggaggtgattagatcatgggggtggtaccccatgctgttcttatgatagtgagtgagttctcattagatctgatagttttataaggggctcttccctgcttcgctctcattctctctcttgccgccttgtgaagaggtgccttctgccatgattgtaagtttcctgaggcctccccagccatgcggaactgtgagtcaattaaacctcttttctttataaattacccagtctcaggtatttcttcactgcaacatgagaatggactaatacattaagcaagtaaaatggattcgtaccattcctccaaccaccttcagtaagaaaagacaggtttgaattcctgtttgcaattatattcacagccaattctgaaatatttagatttttcatgatttctagccataatgataaatgtaagaatctgaaattattgaggtcttagtctgtcagacagatataattactgatacatactgcccatttcatgcaatactgcaggacacataaagtgtcattttaggaggaggagaaggacaaggagattctaagagcatgtgttctagagtcagactggctctgagtttactaccacttactgtataatcttggacaagtctaaactacagcatcttcatatgtaaaataatgataataacagtatttacctcataggggtagtataagataaaatgagataatacatgtaaaaagcataagtcagtgtctggcacatggaaagaaaatttttaaatgaggtattcttaaaattaattctccattcctgatcattcaatgtccctttctttaaatatttttgaaactgtgaaatttgttttaattcctcattaacagagaaactaagagcatataatttttgttgctcttaaaaagaagcatttcataggtactaatgagttcttagaacaaaatgtatgtgctgacagtgagcttcagctaggttgtcattgtgatatattggcatggtgtatagggtggagacatagagtcaaagatcaaagaatagttccccaagatggaggacatgaatacagaaatatttcaaacacatggacttttcttcttagaaggagatggatttaaaatactacttctcaagtgataaaatgggagagggtactagagaaggtaggtgaattctttccgagcaatctatcattgaaataaaaaaaggtttcttcaactttcttgccagaaggaatattgttaaactttcccatgcaatatgaaaaacggtttacatctaatttctgaaatcatatgaaactaataaaacttaaagaccttgttcatgcaaataaacccaatgatctccattcctgtaaagcatctgagtccagctaaaaccaatattgcttagctacagaaggtcacagcccaccagtagagtttcattcatgttccacaatctctctccatggccttcatgttctcatacactttggatgctggacttcatggccttttgtcagctgactctctagcattttcattcccacattctctggcactgctacatgaaacctactctccatcctggaactttgcacaacgttcctggcacccatcataactaatgcacttaatggcatggaaaatctgacttctttatccttctccactaaatgtctgcccaggatccacttcctctatgaaattattctcaaagagtttgatctaacttctattctgaatctctccccctgcccatttcatgcaaatctgcgtatatctgcataaactcaggccatcccttaaaaatgtgaattccttttggatggacttcccaaataaaaatctcccatgtctatgagaactcctactgggataatgaagaaacgtggttatgttgatgaatattgattgatttatacaatttcatttttttggtgctaatattcaacaaacagaagtaaagcacgtttttggcattaattatttgactccggagccaaacaatttagttactaatcccagctctattacttaccactgtgttactctttttaaacctcagttgtttcatctgttaaatgagggtaataaatagtatctacttaataggattattttgaagattagatggataatccatgcaaagtgcttttaaaaagggcatgatacgtatcaagcactccataaattgttgtccttgtcaccatttatttataagaaaaatacagccagtcactttctatagtttgattgtatctcatataatggaagttaccaagttatgaaagtgtcagtttgatctgaatttaagtatgtgccctcttcttcagaagttctgaaattatatatcaagactggcagcataaaagtaaattcttgtttcttattatatggctcccaaaacaattggacttgccaatactcttccctcatttttgcccataagacaagtgtaaagtcacccattacctcctaggggtcaaatccagtggtaccacaattcctatcccatttgacctctcctgtgttaggttctgtggaccctcccttttcctcttcctttgacttccagaacacatgccctgttggttttcttcctgttttgggggtccaatactccttggtgccttgtgagtgtctcttctctttcttcaaaatagtgatgttccctagatctctttccttctcacttcacttacttgccctgggtgatgccatattctcccaagatttcaccaagctaatgactctacatttaccttttctgccactgcctgagtccaggcctttatcatttccaatctggcctacgtaaattacctcttaaatggtacccattttaaaatttctccttcacgcagctaccaaaatgacctccctaaagtatgaatctgacttttcatcttcaagctaaaacatttcaatgatttcccttacctcactagatacgattctaaaatgtttaggctatctctcccttctgtattttaatgacccaaattaagaaagtaactacaaatttttgttgctcagatacccagttcaaactaagaacaccgttctaaaatttttcttaggactactcttttagtcaaatgactttccattataagttgttggacaaccaacaatttaaaatctgttttaaaataaatcaaaataggttctcaaccccagtaaatgaaaaccactggatctcttaaattgaaatgttttagataaaggcaattatatacaacacacacacacacacagtatatattggtgctttctaaaaaaatgatattgaaagatctaagaaagaatttagatttttcatgatagtgaaagcatataatataaataaatgcacttaaatatacttaaaaccagttgtaccaaagaaatgaggtaacaataaaaatttactattctataatttggcagcattgtccaagagtttagaatttggatccattataaatttcaagaccccatattatagaaccactaaaataaatctttactactaaccaaggaacatttgttgtgagtccacatgtctcagaaccctctctcaatgtgtagaaacaatgtatagggatgtttatgaattcaagagaaattgctaaaggaagagagggtgaaggcctgctggatcagaagcagaagttctgagttctgttttgacaacggccctgattctcagagatggtaagattgagccaactatttattcaagatgtctcatcttcgaatgagaggctgtagttacacagatctctcaggcccctgcaaagtttagaaatgtgaatatttagctattgcatactcacagaacagaaaagccctcctagaacatgctttaagaaggatcaagtaccctgtgtctctcaggtcacccacagtttaaagaccatttaagtgtccaaacttaatggggctccctaatctataggcttgcaaacctcccttttcaggtgctaaaatctttaattttctcactgccttaaaccattctgaatatttttatataacatggcctgacttgttctaggctcaactcaaaagaaatttagcagtgcattcaacacaaaatccctctgcttacaggcacaagtaaagacaccgcctgacacttccttggcctcaattgacacacactagaaactctgtaagagaatgggtggaggcatgaaccgtgtgtatttttagcatcagtttcttgtgctgggttataacagctgtagacagtaaaaatcaaggatagagttgactgtatcagataattgaagacatctgcatcatcacagtcatagtacctggacattttttttttttcctgcagtggagctttaatgtattggacgggattatcagaggctggattgccttcaccatttggtaccacattttactttatgatgagctgcaagccagagtatataacgtgtgacttagggctcagtagcataatcaagaaaatacaatgaaaaaaagagtctgcattctacagggtattaactgaaaagctatccctgtattaagcaactctgttgatatttggacatatctgtttcagactgctgtcttgtaaactttcctttagaaagaaaactcttggcatatagttacttttgcactcctgccaaatacaggtaaggtctctcaatacaagacaaaaaagaatgcagtgagcatatcggcattactcaaactaaaagaagaatgcaatgcgcttcacataactcaaggcaagtgatccacattccctaagtcagaagtccagaactcacagagaaagtccagcaatcctctagtttgctttgatttgaagccttgtatttgtcagaagccgtggaattaagtcagaaaaaacatacaaatatgtgatatactaaaaaaaagacaattttcccagccagcaagaatcctggaagtgttagatccctcacacagatcacagaccccacagccacctgcaacttgagctccgaatgtcacttaccctatgacgatgcaggagatggcagttcccaagaaggcatacgttaaaatagatcctaagttttgaaaaaagtgtctctggggagaaaaaaagatatttaatagagtacatcagaattttttcttagtgcaaaagaaaataaaaataaatgtatgcagttcacagacccctcactgtttaggcaaattttggttttggagcctcgttcctggccttattgtgctaatagggacttaactgattatcattgcaaaggactggagggaaaagtcaagaagcagaaaaaaaaaaaaaaaaaaccccactggaagatgagtaggtagggatgagagagacaactccaagaactggctggacctgagagggaagcaaggaactgggcaatgtctatgccagaatcggggcaataatggaagacacagttttcatgaagttttgttgtaaatgcaattcctttagcattaaaacaacaacaacaacaaaaatattctaagagatttacgttgcctgttgattttactggatgtctgacttctcttttatatcttctgaaggggatgaaaataaactttaaaaatctacaacagcctggggggtggctcacgcctgtaattccagcaatttgggaggctgaaggaagattgtttgagtacaggaggtcaaagctgctgtgagccataatcgtaccattgtactgcagcctgggcaaaggagggagactgtgtctccaaaacaaaacaaaacaaatcccccaaacctacagcaattcactttattttaatgagtcagccacaaaatgatgcttagtattgggactgccaatgaggaagggttacctgaacaaatccagccttctaaattttttcaactgcttgcttagggaaaaccccattccagttttttgagtgggatctgaggagccagacctgacagcaagagggagcctggagtacacacaagaaaatcaggtctgtgatgaacaagctgcctggctgctgaagatgactgctcaagaggaagaaagccccaggaatctcctagagtgggagctgagcagcagaagagcagccacatcacctctgcatctcaaaaaccacgtgggctggagcctcactctgtggctcaggggatgccagtacttaaaccattatgtgaattactaatgtacaaaatgtgcatagtcaggccgtgctcaagtactgttagacaagtgcatagaaactgtaaaactggactttcctgtctatgagcatcaacagtagtcttgagttttcactttaaaggataaactcaatgttaattaataaccaaagtctttggttacaatcatccagaataatgctgtccaatagaaatataatgcaagccacatatttaaaaaattttaaattttctagcagctacattaaaatgtttttaaaagatgaaataggttttgataatgttttgtttaatccaatctatccaaaatactaacatttctacacgaaatcaatataaaacattatggaaatatttacattatttgaataaatacaaaatctttaaaatccagtgtgtattttacacttaaagaacatctcgattcagacaagacgcatttcaagagctcaatagttacatgtggttaatggcctgtattcaacagaacaggtttagaagaagtctagaattctaagcatgtcaggtttgaatctgcatcacaaatttaagataatgatactcttaccaaatagagaagcccataaaaataacagtttctcattagtgctggtaaaattctctacttaatgataaaagaagaaaatgatcactatatatttaccttctttagactatatcctgcatgaaatataattggtggcagtaaaacattgaagaagatttctggatcaaatgtcatctgccagaaaggaaaaaaaggatagttagaatgatgctcctttgggtcattaaaaaaacatgtttcaaaaaacagttgtaattgcttttgctaagcctttgtgaggcatattaactattaacttggcagagatgaaggtaggaaaaaatgaaaaaaaatttggaaattcataaatacagtataactgtagcttctaaaggtaaaatctacatacttccacactatagctaacaacaacaacaaaaactcagtgaaatctctctgagaaaaatgtctttttatatatatataaaatatatatgtatataggcttcttacaaggatttatttaaagttttccccaaataaaatatttttggaaattggttcttcgctttccctattttgtcccattccaaaatttaaaacattttccagactccatggaagaacacacttgaacttgaaaattgatttttctagtatttgtttattgggttttacttaaatgtcaaaataaacttggccataaagcaagtatgacttggtatgaagtgcagtgaaattgtcaggcctctgagcccaagctaagccatcatatcccctgtgacctgcatggaccagatggcccaaagcaagtgaagaatcaccaaagaagtgaaaatggccggttcctgccttaactgatgacattccaccacaaaagaagtgaaaatggcctgttcctgccttaactgatgacattccaccacaaaagaagtgaaaatggcctgttcctgccttaactgatgacattaccttgtgaaattccttctcctggctcatcctggctcaaaagctcccccactgagcaccttgtgtcccccgcccctgcccaccagagaacaaccccctttgactgtaattttccactacctacccaaatcctataaaatgtccccacccatatctcccttcactgactctcttttgggactcagcccacctgcacccaggtgattaaaaagctttattgctcacacaaagcctgtttggtggtctcttcacacagatgcatgtgaaatttggtgccatgactcggatcaggggaccacccttgggagatcaacccctgtcctcctgctctttgctccgtgagaaagatccacctacgacctctggtcctcagactaaccagcccaaggaacatctcaccaattttaaatccggtaagcggactctctttactctcttctccagcctctctccctatccctcaacctctttctcctttcaatcttggcgccacacttcaatctctcccttctcttaatttcagttcctttccttttctggtagagacaaaggagacacattttatccgtggaccccaaaactccggcgccagtcacagactcgggaagacagtcttcccttggtgtttaatcactgtggggatgcctgcctgattattcacccacattccattggtgtgtgatcaccacagggacacctgccttggtcattcacccacattcccttggtggcaagtcaattgcggggacgcctgctttggctgcccagagctgctccccacacccttctccatgtctctacccttctctttaaatttgcctccttcactataggcaagcttccaccctccattcctccttcttctcccttagcctgtgttctcaagaacttaaaacctcttcaactctcacctgacctaaaatctaagcattttattttcttctgcaacaccacttgaccccagtagaaactcgacagtggttccaaacagccagaaaacggcactttcaatttttccatcctacaagatctagataattcttgtcgtaaaatgggcaaatggtctgaggtgcatgacatccaggcactcttttacacatcggtccctccctagtctctgttcccatgcaacttgtcccaaatcttgcttctttccctcccgcctgtcccctcagttccaaccccaagtgttgctcagtctttccaattttccttttctacagacccaactgacctctcccctcctccccaggctgctccttgccaggctgagccaggtctcaattcttcctcagcctctgctcctccaccctataatccttttatcacctcccctcctcacacctggtctggcttacggttctgttccacgactagtcctcccccacctgcccagcaatttcctcttaaaaaggtggctggagctaaaggcatagtcaaggttaatgctcctttttctttatccgacctctcccaaatcagttagcatttgggctctttttcatcaagtataaaaacccagcccagtccatggcccatttggcaacaacccttagatgctttactgccctagacccataggggccagaaggccatcttattctcaatatgcattttattacccaatcctctcccaacattaagtaaagcttcgaaaattaaattccagctctcacaccccacaacaggacttaattaaccacgccttcaaggtgtacaataatagagtagaggcagccaagtagcaatgtatttctgagttgcaattccttgcccccactgtgagacaaaccccagccacatttccagcacacaagaactccaaattcctgaaccccagctgccaggggttcttccagaacctcctcatccaggagcttgctacaagtgccggaaatctggccactgggccaaggaatgcccgcagaccaggattcctcctaagccatgtcccatctgtgtgggaccccactgaaaatcggactgttcaactcacctggcagccactcccagagccgctggaactctggcccaaggctctctgactgactccttcccagatcttctcagcttagcggctgaagaccgatgctgcctgatcacctcggaagccccctagaccatcacgaacaccgagcttcaggtaactctcacagtggagggtaagtctgtaccatttttaatcaatacagaggctacccactccacattatcttcttttcaagggcctgtttcctttgcctccataactgttgtgggtattgatggccaggcttctaaacctcttaaaactcccaactctggtgccaacttagacaatactcttttaagcactcctttttagttatccccacctgcccagctcccttattaagtcgagacattttaactaaattatctgcttccctgactattcctgggctacagccatacctcattgctgccttttccccagttcaaagtctccttcgcatcttccccttgtatcttcctaccttaatccacaggtatgggacacctctgctccctccttggtgaccaatcatgcaccccttatcatcccattaaaacctaatcacccttaccctgctcaatgccaatatcccatcctacagcacgctttaaaaggagtaaagcctgttatcacttgcctgttacagcatggccttttaaagcctacaaattctccttacaattcccccattttacctgtcccaaaaccagacaagtcttacaagttagttcaggatctgcgccttatgaaccaaattattttacttatccaccccgtggtgccaaacccatatactcttttgtcctcaataccttcctccacaactcactgttccgtttttgatcttaaagatgcttttttcactattcccctgcaccacttatcccagtctctctttgcttttacctggactgaccctgacacccatcagtcccagcagtttacctgggctgtgctgccgcaaggcttcagggacagccctcattacttcagccaagctctttnnnnnnnnnnnnnnnnnnnnnnnnnnnnnnnnnnnnnnnnnnnnnnnnnnnnnnnnnnnnnnnnnnnnnnnnnnnnnnnnnnnnnnnnnnnnnnnnnnnnnnnnnnnnnnnnnnnnnnnnnnnnnnnnnnnnnnnnnnnnnnnnnnnnnnnnnnnnnnnnnnnnnnnnnnnnnnnnnnnnnnnnnnnnnnnnnnnnnnnnnnnnnnnnnnnnnnnnnnnnnnnnnnnnnnnttctcagcttcttgaccctgaaaaaaaatctcaaataagtgatgtgagatcctggttcttagtacacacttgttaaacaggaattcatttattccaaagactgatccagggtttacaaggcaccacaaaagataacctaacctgatttctgacccagattcctgaaagcagaagaaagttttccttccagtaactgaagccgttcacaaatctgcaattatgaaactatttttaaaagatgactcatttcacaatttttttctacctaaattccttaaccaaactgatagtcacgatttcttgacactgactgcatgtcagtgtatttatacatagccaagtggccagtgttttgtgttggtagccaaaagccagtcatcctaggtttccaggtttgcaagtgaaaatgtttttattctactccattttccctttggcttaagaaagatttgaactgcactttcagctggcattatatacaacggtgctgaaagcacatgtgtgaaaacttgaatcaagtatcaggaaaggcagagttgataaatgtttttttcttttaaccaaatataactgtggcttgcagaaaaacaaaaaagaaaacctttctttcctaacttctaggaaaaaaaaatacaggcaactcagcttgtaataagggtataactcagggtttgactccttagtcaattaacgtctccaaaagagtggtgttaaaataggcatatatgtgtgtgtgaatgcattatataaaaagtataaaggctcaaatatgatacaattatttatactgtaaaacaaatatataataccagacaggatccttaccttttcaagtatagcatttccttgatgaggattgatgttgtgctgacttatttctcttttgtatttatattcataaacttggtcagtgatattaaccagcagagttgatggactgaaagttagttttacacagtcatagacagttccactttcaatatcagttggtgctgtagcatatcgtaaaattagtcccattataaggcctaaaaaaaaaagaataaataatggtactggaggaaggcaatctaaaatgccactattggaaacctatatgatttggaaccttcagaagtgacaggataaagtgttgggttattgcctggtctagaaaagtgttcacttttgcatggataccagttcaacataatatagtgttaaaatatttgtagtgagcaccattgcttcaatactcagcaaatcttcccattttttttctccctagtggacctactaattttggagagaaaagatacctaactccttctatccatccaaatactttaagaaaacctttgctctgtgatagacactgagtcatctaatcaggagatggaattcccctgggagtgtttctggtccacagattagcacaaatctcagttatccccatcagactttattatgtcacaccccatggttggggtgagaggtgttcttgttctctctctcaggacatgactaaggcaatatagttcttttttttttttttgctggcaggttatctgtgaccataagtagatccagtccaagaatgcagccaatatactgaggagggtaggactaagatagtagcagaagacagaacctaggtgttgaaggacatcacagagccactagatcaaccagcctgccctagagctaccctaactctaaacttcttgctgtgtaatataatacattctctaatttttccgttttgaatctagtttctggttacttgtagccaaatgcattctaatgacaccacattccttttcataaacaattcaacctaagtgacaatccttgaatttttacgtttttaaactctgtgaagatgctcatggcaatctgataactgtgggctttttaaatgtagatttattaacaagcaacagagaaacatcagaagcctaaactctgtcaatttaaaattaggactgatgtatgtgttttgggataaatgatccagagttcactctttaaaacttctaattttggagattttacctctcttatgaatctggtcatctaataaccttttatttctttagtaaaacatttttggggtgcatattgtgtaccagacatttataggtataaaattagaatacaggcccagtcttacaggagctcgtttgtataagtgaagattcatgaacaaacaattataataaaacatgacatgtgctatgaccgctgggaagcactctgtgatacatgagtatagacagggggtattccgaagccctttgaattatgcaaagcttgaaataaatcttaaaaggtcacatagatttgtccagaagagctgaatcagaatgagttgggatccagtttgcacatatgggtagcagcacgtaagagcagagacagctgggatgctctccctgtgtgtagaccaggatctatgctctccctgtatgtagaccaggatctacgctctccctgtgtgtagagttgctattggcaagtggctgctcagccaggtgctatgcttcctgattgtcttgcatctggctggttcttaccagtggaagaatgttgggatactgtgtaagaaatcactagtgataaccttactaacacaatgcatatatacagaaagacataagaaatctggtgcatttagggagtcactagtggtgtaaaaagagaataaatagagagaaagagagacagagagagactctagacctagaccataggcagagccaggtcagaaagaggctcctctctcatgctgagaggttttgatttttaacccaatggtaatgtagaactattgaaagattttaggcaggggagtaaaccaatcatgctttcatgtgagaaccatcactttggcaacaatgttgagaactaatcagagtgaggatgagaatgcaagcagatttctttcaagaatatttttattttattattcctgcttcagtgtttggctgactcctccagagtaattagaaaaattgtatccaaatctctgggagcaagagaaaataagttatagatacgtaaccctcactgagtgcttgatccaccacagcacagtaggcaaccttccatgctcagtgttgaatgacgacaataaaactagtcaggagcaagaagggaacatagatcatctacactctacgtggcttagggtgcttgcataagaacatcattttttcaacacacgttgcttagaaaggatttaattcctaaaagttattcagcaagtaccatgaatgacaccattactattctttctacttctacaaagacgggaagcacaagatactatctgcatggggcctaaatggaaagaatccatattaatgtcatttgtaattcctagtgggcgaggcactctttttttttttttttttttttacaaaatgctttcaatgaaacaacaagaaataaacatgaagtgtccactattagttcccaagcagagaaagcaagtctttgtcataatagtgatggcctggtgcctagtgtggttaaattcatacaagacctccaaacctaaatggccctgactatccctctgcactagctctggcctcattgttcgagaagaagcacattgaagtgaacagaggaagctgcttgctgccattgtggcagaggtgaccagatgtaatatccatgaaaatgtacctctcagatagatgaaaatgtacctcccactctgaggaggcaattgaccagtggtctcagcttctctgctctggaatccatcaccactttcacactgaggtcaggctcccagccgatgactgaacacagcagggatactaaggcaagcagatggggactcctctgaagggcaaccatggctcagggacccatcattaatcttgccaaacttttcctagaattgcaccacagcctaaagatttcctacccagctttccttccttctctctcttcacaggatcaggcctgcatcaaaacctgacagctgtcctggcatcctcatgctcactccccacattctctaaaggaatgaaaatcttttgtgcaatgaatctctttctagcatctgcttcttggaggacccaaattaacacactcaccaaaaggcttcagccctccttttccccaaaccccaagggttgagaagaaacaacatcttgctagatggtaagagccagtgtgaaaaatctcagcctcctaacacatctggttaaaaaacccatgcactcatttgtgcactcttgctgcagcagcggcagctggaaaatccttatttgtcagaggctacttacccatagagcctcataatgctttttatagtgaaacatcgactcagtgttttagccatatgctgacagaaatatggagtgttgaattaatgtacactgacacaatatcatatatgagtaggtgacagataaagtaggatggctagtagaaagaaaatgttaatgagagtaggttgtttttataccattcaaagatacaagattaagaaagcagaaatcacttgttcacagaagaaggaaagaggagactggctgccacggcttatgaacagcacaaaagcaccactcttgttggtaaaccatgaaaccaggccccttcttgctggaggaggaaagaagagagcctgcccctgcaaagggatacccacccagtccatgtgcaaacagccctggccccaggttgaggttcctgcatacacaacacttctctgagatctgtcccctggccagttggcagcatctccttctctaggaaggaactctagtctagatgtatcccctgcttcttcaagtctgggcgtctgggtacctaggatgacagcagagtgtacctgcactttaatgaaccctgacttctctccacagcctacaagtaccacagaaagcatggacaatggacttcattcctaaagcactcactatcctaaaatgtccctcttaagtcccacccgtgggcaccagaaccctgataaagtctgtgctcattgaactccttcatctttgcattctgatagcatttattgtttgaaccacacactttagaaaccagttttataaagacatattattcagtgcttctttacagatcttggcttttctcctcaaccagacaatgagactgtttagggcagaggctctgtgctattctttatctcttttcctctagaaaagccaatcactttgggcagaattgtagcccaactttctccaagtccacaagctccctggagtcaagaagaaaaggtcctccgagtttatgtagtcagtcagttaccaacattttaaagtgtcacaaataaggaacatcacaccaaatgctgtgaagtccctgtccttgcagagtgttcaacataactcttatatagcacatgcatggcatacagttgatagcatgatgtttgtgagagaagaaagaagagaggggacagaaggaaggaggaaacagcctcaggagtactcaaaccaaggaacattagaaagatgagccttaccttcctgaactgattctcattttattatccacattgaaaataagagaaaactccagtcccttactctattactcccttattatgtgttcatgccacagacacctaaggcattgctctaggacttgtaggagttattataaagataaataaaatatgattttgcccttaaaatattaaaatatcttaacctaccagccccttcccttctgccaaatcctgccatcttaatttccagtaagaataaggtataacaagtatttactaaattttttatatgaagtctgcatttcataaccaatttcccttgcatcttactgatggtcattccacatgaggctgaagcattttcttaaagtggcttttcttagagaaataaaaaatagggacttacttttttaaaaagcttaaataaagcagatttcagaatgttttttaaaacacaaaagtgttttaaaggagattttaatctctttggctgtgttcaacactataattgtgtccagacaccatcacacagagttccctgctgcttggcacaactctggccagatcgctttagactccattcctataggagcagagcttccccagagttgcacaatgcagcaagcacagctatatacatatgcctaattagactattacaaaggtctatatttaagtgctacatgatgttggaagaatttaggagtctaaagcaaatgtagttaccacatgaagattgtaggagaactgagttttgcagttctttcactctcactgcattgagtggctaccaagaataatctagattcatgaggcatcgccaattctctaaaataagaagatatagcctcaaaccatgtaatattatataatatcatatttcaaactggtaagtgtatcaggtcctattgatcgccagcccaatgtctatccttgtttaccccacaaagctctggtttatttgctgtccacccctccacacatagccatatgctcaggggaagttgaactcactccagctccggggatgttctcactctccctgctgataaccggtttggaatgggtatgtgaccctattcctgtcaataagaagtgaagggaatttgctagggagcttcttagaaaggttttcacatcctacaggagagacacagaagagatgagctctcttcttttccagcatattaatgggcccggttaggacaccaggcactggcatagccacttcactgccagcctgatgttgaagtcagcactgaaggtagcagaacagagaaaaggaaagaaccttggtttttgatgacaacagtaggtgctgaatcaaatagagttgaagactactcttctctggacttccagttatgggagataataaatgtctttattgcttaattctgtttctgtcagggtttctgttacttgcaactgaatgcatcttaacagatagaaaagccattggttttcctgtcacaaagcaatgtacaaagttttaagggaccctaaagaaaagaccaactaaccccactccctacagtattggaaaaacttaatagaagaggttctcaaggatgtgtaagagttcaccaagtagagaagaggacatgttgttttagggagaggtatacagaaatcaaggagcccagcgtcaatgacgcacatcaagcagtttgcgatgggcacttagggcagtgcaggcaaagggctttggcacagcagaggactggagagtgttcaggagggagagggtgttggcaaggtggtcggcaaggtggtctcgaggaagaatcgagcgagttccttgttgggaggcagatttgctctgttttagagcagaggaaacagcatttagagataattatttgaagacagaaaagagaattgagggacagagaggacatggagaggaagttaacatcatatttagtctatatttacataagggacaatttagaacatctgagttcaggaattccaagatgaaaggaataacgttcaaggaagaatgttctttaccatcattagaactttgtacaatgcaagactttaaggcagggaatctgtgacattattatttcagtcactcagattaaaaaattatgaactagggattcaaatgtgagcataaagaagaaggaaatagtctgaataataatttaaggaaaccaaatcagtgaataacatttaactgtaagatagtattcacaaagatcagattttaactgcatctacaaaatttttaactttttatttgatatttatcccttcccattttataaaagtctcttttagaacatgaatttagagagataatatgggtttgaacttcaaatatctaaatgcatttcctaacgttttcccttttagcaatttagttttgctctgagaatagtcagagatggaacaaaaagtaaaaacatgatgtagtaacaacgtacaatgccttctgtttttggtgggggagtttgttctttctctgttctcccaccaaccttttaaattaaaaaaactaaggaaactataggtcttgctaaaaagtcacaatttattgctccatactagctcaccatcaacttgttttggtgaagagtcccagaatgatttcagaacaggtctgggacacctgccaattaagagaacctcattaaattccaaagtggaaagtagtccatgaagctaattaaccttgtgatgccttgttcaaagtttccctcttctcacaggatagagtcatatgaaaactgccagaaagtcccaaacatcagatcctccatcagagtggggtgtctaatgtccacaatccatccttggttcccaacaaacaacacacatacacacacacacacacacacacacacatcacaagcgcacacatgcacacacatatagcacatatgtaaacatacatgcacatacatagacacaacacacatgcaagcacatacaaacacaacacatacacatatacacaatgtacacacttcacaaaactctgggatttctaacagtataatagataacttttctttagaaactatctcagccatcagcttatatatagctaacatccttccttgcaatcatcttaggaagttgacagaagaaacatagaaatagagatgtctaactagacgtatactgaataaacaaatggtttcttactttgtaatgtttatacaacacactttatttttttctcgaaccagagatggagacattacaaagtgttatagacggtgaaagaaggactctttagtaaagggagatggtcttccaaccctccccctttcaccataggagagtaatgggataagaaagaaataagagaaaacagaggaaatgaaactaggcactatatttcaagtttattttcctagcaaagtatttctcaaacttcagtgcatcagaacctcctggaaagtttgttaaaacacagtttaccgggccgcacccaccccagagtttctgattccctaggtctgggctgtgaactacatatttgcatttctaacaagctgctgatggtgctggtcaggaaacacactgagaagcattgtcatataagatagtagttcctaccaacataagtcctcacagtcttgaaattccatcaaaacccataccatcttgggctcatgcacacagatttcagaacttggaaaacccagaagcatagttaatggttctaccttcagtatcttccaaaaattaaattcagtttaactaacatatgatgaaagcctattttgcatgattcatataaattcacagtcccttctcaaactatttatagtacctgtcccacccattgtttcaaccataggcatttaaaaccagaaagaccatgaacttgcaacatgactatccctcaagctgggacaatgtttccaggtaggcttggaatatttcaactccagctacttaatatggatgtattttcatagttttgcccccattctgtttcccacagtgggctttttgctatagacagtggaacatttcagaggcttcaaggtagagaagaaacttaactacttttaccttcaatcattccctaccctgacttcatgggacagttgcatatcaagagcagacttggatgagagaacgactgcagccagaatttgagagtgcacgctttcaaaagagtgttcttgccaattattctgggcagagttggttaagtcataagttttctgagtttctgtttccttatatgcaaactaaagatgatcttgcctatttagcatggttgttgtgaggattagtgataatgcatatagttacatatctcaatctctacctctcttctgtaaacttcctaaggtaccatcatctggcacggagcgaacagttaattaaaaaacagcaattattctaggactacataagcgatagaggtgaaagaacagaggttatatagtcctgaagttgagtacagccctgttgattatcagcaagttaccttctctctctcagtgttggtttccttatctgtaatatgaaaatgataacacaccccctacacatacacacacgcacacacacacacaaacacacctacgtttaagatagcagatgaccacatgaagccaaactgctaaggtttgagacctagccctggcatttagtacatgtgcaacttcaggcaagttacttaatgttttattacctcagttttcctacctaaaaaatggttgttgtgaggattaaatgcgttaatatatgtaaagtgcttataatagcatagtttatatcaggaatgctatttgtgttagctatttttatttttgtatatcaactttttgacataatagatgtttaacaaacatcagctctccatatccccacttcattaactatgtaacattaattcaatgtagatggtatatgatatctacataaataatttgaatcataaatctattttcttgatatgcacattcattagcctttcaaacactgaggggggagtccttcgaggcaccacagtagtttgcagtaaagtttcatctatagcttctttgagattcagaatatagtttattcatttatttagtttacttatccaaaatatagaggctcttttctttatttttcttttttgatacagtcttcccgtcacctaggttggagtgcagtggtgcaatctcggctcactgcaacctccgcatcctgagttcaagcaattctcctgcctcggcctcccgagtagctcggattacaggcatccgccactannnnnnnnnnnnnnnnnnnnnnnnnnnnnnnnnnnnnnnnnnnnnnnnnnnnnnnnnnnnnnnnnnnnnnnnnnnnnnnnnnnnnnnnnnnnnnnnnnnnnnnnnnnnnnnnnnnnnnnnnnnnnnnnnnnnnnnnnnnnnnnnnnnnnnnnnnnnnnnnnnnnnnnnnnnnnnnnnnnnnnnnnnnnnnnnnnnnnnnnnnnnnnnnnnnnnnnnnnnnnnnnnnnnggtgcagccagtgagagaaggctgctctttgtgactgcagagccatcacttcccaacatcattacaaaaacaaacagctcgccctcgactccccacatgacaatggacccgcatctgtcaacagacttgcattatgtgccgtgtgagaacatgactgtgacatttgctctcgtgacatggcaaatttcggcggcttgtctgtaaagagattagcattcgttacgctgcagcacctttcatcaaactaatgacatttcaatcagcacattttctccagtttcggtactttgctatctgagcacaagtctctaattacgctcaagcaacaagtttcacatcaatctcacaatttatgcactcaccatacaccattgctcctccagtttcatgcaagaagcggaatcgatgatttttaaataaccagattgtcaaaatggtaaggatgagcaaaaaattgaagacaagcagctccaccgctccctgatgttgaaactgatactcatccttttctgacataacccttgactgtctctccattccccagtcttcttgggattccttagataaaaacctggataaaggctattttatcaagatttgcctaagacagtctgactgcctgagaatttcagaagaaacactgccactttagttgctacttcacaagcattctgccctggcttagtattcagatggcttctagttacaacttcctgtttctctcttaaagcagccctgtctcttttcaaactcgagagtgtgtggtttcatcactgactcttaatgtctttaagtgattcatctcatgaaaatatctttcatactggacaaatctgcaagcaatgatgctaagatcttgaatcacggtcttattattccaaataagtcttcttaagctgcataaatatgaactgtagattaataataaaaaaggtagccttacactagcaacgttttctaagttcaaaaagccaattcctgactcaacttcacctaaatgcaagatctttcctctctaaccaagacctgccaaagtgatggggattgatagcacagttatcaatcagcctctgtgctctaaatggatcagcatattagcctcctgaaaagatattacactgcttagcctgaaacttccgcctcatagctcaagtatctcacaatgggattcacttaaggcatagggtttcttatagggtttcttatgctctcaaatcatgactgtacattggttaagcaaacctaaagtgatttcacaggattttttttttttttttttagttgagaagcaagaaaggatttagtatatgactctatttggctttatataattgatagttgcagagcagcctttaaactctaaatcaattgtttttcttttaacaagagaaaacaatgaaagcaaaagacaaataaaattccatccccatctctacaactgtactgtttggatacgttgagacaaaaaagaaaaaaaacaaaacacattacttcgaaagagaaactcacgcagccatcctcagcaacgccacatgcatggatttctctttgtagggttcctggtctcggcatccaggacccacagaaatctgcaatagatcacaacctcctctgtcctatggcaaaacaatgttgctcactgagaaatggttctgccaccagaaatgaaagctctgtattcacaggattctgatcataagagtgatgattcttcagatcatcttccatgtggcaggttgctcctgtctgatttcatatttttctactttaaaatagttcaagataataccatgggttctgcagcttttttttccttttctttcttttttcttagcaaatattatgacctgcttgcttttaacacttgatcctataacacatttgggtatatcctggggttagctgattttttttttcattttaccatatcattgtaatttgggagtattaatcacttatgatccccattttgacacaattaatgctcaatttatacaatgtgatttcttattgagtaggctgagcccaaatgcgtcctgaaacaatttttgtcactaaaagctaaaggtcaagcatgtaatattattgggagctaactacctcctcaacaaacagtttcaccatgagagcaagtctatcaaccccttaatacaaagctctgctgtttcagcatctttgctttgtgcaactttggaagcttatttcctctctgagtttaacttagcagagggtatttatgtgtgctgcagatgttcttctgacacgctaccctttttggcaggaatatctgtgatgactaatattcatactgttttgaaacctatcagctaatgcttgcaagcatttcatggagctttgctagcaggttctacctttatgattttgcaactccacaggttcagtcgagttgtcagatataca

SEQ ID NO: 4 - DNA, 18 bp, human
atcagtaaaatggaatgt

SEQ ID NO: 5 - DNA, 18 bp, human
tagtcattttaccttaca

SEQ ID NO: 6 - DNA, 24 bp, human
ttaatatataaaatgcttattaaa

SEQ ID NO: 7 - DNA, 24 bp, human
aattatatattttacgaataattt

SEQ ID NO: 8 - DNA, 20 bp, human
atcagtaattttatatatta

SEQ ID NO: 9 - DNA, 21 bp, human
tagtcattaaaatatataatt

SEQ ID NO: 10 - DNA, 21 bp, human
acattccatttgcttattaaa

SEQ ID NO: 11 - DNA, 21 bp, human
tgtaaggtaaacgaataattt

SEQ ID NO: 12 - DNA, 301 bp, human
ccagttgccttcatagggcttttctgggcagagtgtttccccttagctcaataaaaaccccaggcacttcctggtggtgaaagcccatcaggtgaatcctacacagtggactgaattctactgaagaaaatggaagtatttttggttatcagtaagagtaatggaatgtaggctagagattaaatctggagaaggcatcctgtccataatgaacattcttagctttgccatcacaagcgtcaaatgaattagcacaaatgcaccacctaactttgctttcacagctccattaactcaataa

SEQ ID NO: 13 - DNA, 195 bp, human
ccagttgccttcatagggcttttctgggcagagtgtttccccttagctcaataaaaaccccaggcacttcctggtggtgaaagcccatcaggtgaatcctacacagtggactgaattctactgaagaaaatggaagtatttttggttatcagtaattttatatattaagtgattaacaattatatacctatgtgt

SEQ ID NO: 14 - DNA, 87 bp, human
cacataggtatataattgttaatcacttaatatataaaaatgcttattaaagtatagctgccaccttccacttcttcttccttatta

SEQ ID NO: 15 - DNA, 189 bp, human
ttattgagttaatggagctgtgaaagcaaagttaggtggtgcatttgtgctaattcatttgacgcttgtgatggcaaagctaagaatgttcattatggacaggatgccttctccagatttaatctctagcctacattccatttgcttattaaagtatagctgccaccttccacttcttcttccttatta

SEQ ID NO: 16 - protein, 427 aa, human
MWNVVQSNNGIKVLLSLLSIKMPITDADQIRALACKALVGLSRSSTVRQIISKLPLFSSCQIQQLMKEPVLQDKRSDHVKFCKYAAELIERVSGKPLLIGTDVSLARLQKADVVAQSRISFPEKELLLLIRNHLISKGLGETATVLTKEADLPMTAASHSSAFTPVTAAASPVSLPRTPRIANGIATRLGSHAAVGASAPSAPTAHPQPRPPQGPLALPGPSYAGNSPLIGRISFIRERPSPCNGRKIRVLRQKSDHGAYSQSPAIKKQLDRHLPSPPTLDSIITEYLREQHARCKNPVATCPPFSLFTPHQCPEPKQRRQAPINFTSRLNRRASFPKYGGVDGGCFDRHLIFSRFRPISVFREANEDESGFTCCAFSARERFLMLGTCTGQLKLYNVFSGQEEASYNCHNSAITHLEPSRVRGPCC

SEQ ID NO: 17 - protein, 563 aa, human
MPEDDQRATRNLFIGNLDHSVSEVELRRAFEKYGIIEEVVIKRPARGQGGAYAFLKFQNLDMAHRAKVAMSGRVIGRNPIKIGYGKANPTTRLWVGGLGPNTSLAALAREFDRFGSIRTIDHVKGDSFAYIQYESLDAAQAACAKMRGFPLGGPDRRLRVDFAKAEETRYPQQYQPSPLPVHYELLTDGYTRHRNLDADLVRDRTPPHLLYSDRDRTFLEGDWTSPSKSSDRRNSLEGYSRSVRSRSGERWGADGDRGLPKPWEERRKRRSLSSDRGRTTHSPYEERSRTKGSGQQSERGSDRTPERSRKENHSSEGTKESSSNSLSNSRHGAEERGHHHHHHEAADSSHGKKARDSERNHRTTEAEPKPLEEPKHETKKLKNLSEYAQTLQLGWNGLLVLKNSCFPTSMHILEGDQGVISSLLKDHTSGSKLTQLKIAQRLRLDQPKLDEVTRRIKQGSPNGYAVLLATQATPSGLGTEGMPTVEPGLQRRLLRNLVSYLKQKQAAGVISLPVGGSKGRDGTGMLYAFPPCDFSQQYLQSALRTLGKLEEEHMVIVIVRDTA

SEQ ID NO: 18 - protein, 233 aa, human
MGKWHVGGRRGAPRQWGATARGRDLEAVRRGGCGSVGRRRQRRRRRRRRRRRMRRMWATQGLAVALALSVLPGSRALRPGDCEVCISYLGRFYQDLKDRDVTFSPATIENELIKFCREARGKENRLCYYIGATDDAATKIINEVSKPLAHHIPVEKICEKLKKKDSQICELKYDKQIDLSTVDLKKLRVKELKKILDDWGETCKGCAEKSDYIRKINELMPKYAPKAASARTD

SEQ ID NO: 19 - DNA, 802 bp, human
tttttacccccattgacagccctcattgactgcattctccattcttctgtaatactaattcttagaccaaaaaatagtgtctgtaggtaaagcctaacttgccacacccttatcaaatatactctatattgttaggccacagtagagagcaagagactactgaacttttggggataccagtaagctctttttctcaaaataaatttggcatcagtatcacttagattgtttttatatcaaaattgctattctgcataggtgtcctatggtttttagggcattgccctttccttagaaatgtatcactcacccaacaggaagagcctctctaagtctttcttggggccctttgggctataagccaacacctcaagtgcacctagttatcacttagctgggtggagggtcagggtactagtacgatgatttttaagtggtattttgagatcctaagagatctttcacttttttattggaagttaaattcattgatttatggaagtttgtgcgtgtaaggtcctgagacctgagccctctgctttttatgttgttttagtttctgcaggacatcttagatacactctttgtgattttggatgataatacagagaagtacggcctgttggtttttcagtctctggtaagtcaccttcctgactctttacttttattaattattcctgtcatatatttcagaaaatttaagggaagcaatttattagagtgaatcagcacaagatatagatgtttccaatagaaaagggactaaggactgtcacccaaggaagaccaagcaaccaac

SEQ ID NO: 20 - DNA, 8455 bp, human
  CDS (24)..(6113)
gcggggccgcgcccggcacggccatgtggacccccacggaggaggagaaatacggcgtagtgatatgcagctttcgaggatctgtccctcaagggttggtcttagaaataggagaaacagtccagattcttgaaaaatgtgaaggttggtacagaggagtttcaacaaagaagccaaatgtgaaggggatctttcctgcaaattacattcacttgaaaaaggcaattgtcagtaatagggggcagtatgaaactgtggttccacttgaagattctattgtgactgaggttacagcaactctacaagaatgggcaagtttgtggaaacagttgtatgtgaaacacaaagtagatcttttctacaaactacgccatgtgatgaatgaacttattgacctgcgaaggcagctactgtctggtcacctgactcaggatcaggtgcgggaggttaagcggcacatcaccgtgcgcctggactggggtaatgaacatttgggcctggacctggtgcctcggaaggactttgaagtagtggactcggaccagattagtgtctcagatctctataagatgcatttatctagccggcagagtgtacagcaaagcacatcccaggtagatacaatgcgcccacgtcatggggaaacatgtcggatgccagtgccacatcacttcttcctcagcctgaagagtttcacttacaatactattggggaagataccgatgtcttcttttccttatatgacatgagggaaggcaagcagatcagtgagcggtttctggtaagactgaacaagaatggtgggccgaggaacccagagaagatagaacgaatgtgtgccctttttacagatctgagcagcaaagatatgaagagagatttgtatatcgttgcccatgtgatccgaataggccggatgctcctgaacgactcaaagaaaggtcctcctcacctgcactacaggcgaccatatggctgtgcggtcctaagcatcttggatgtcctacagtcactcacagaagtaaaggaagaaaaggattttgttcttaaggtttacacgtgcaacaacgagagtgagtggtcccagatccacgagaacatcatccgaaagtccagtgccaagtactctgcccccagcgccagccatggtcttatcatttctctgcagcttcttcgtggagacatggaacagattcggagagaaaatcccatgatatttaataggggattggcaattacaagaaaattgggatttcctgatgtcattatgccaggtgatatccgcaatgacctgtacctaaccctggagaagggggatttcgagagaggaggaaagagtgtacaaaagaatattgaagtgaccatgtatgtgctttatgcagatggagaaatcttgaaggattgcatcagcttgggttcaggagagccaaataggagttcctaccactcctttgtcctctaccacagtaatagtcctcgctggggagaaattatcaaattgcctatccccattgaccggttccggggctcccacctgcgctttgagttcagacattgttccacaaaggacaaaggggaaaagaaactctttggctttgcattctcaaccctgatgcgtgatgatggcaccaccctctcagatgatattcacgagctttatgtgtacaagtgtgatgagaatagcacgtttaataaccatgctctgtacctgggcctgccctgctgcaaagaggactacaatggctgccctaatattccttctagcctcatcttccagcgcagcaccaaagagtctttcttcatctccactcagctctcctctaccaaactcacccagaatgtggacctcctagctctgctgaagtggaaagccttccccgaccggatcatggatgtactagggcggctgcggcatgtcagtggggaggaaattgttaagtttctgcaggacatcttagatacactctttgtgattttggatgataatacagagaagtacggcctgttggtttttcagtctctggtgttcatcatcaacctgctccgagacatcaagtattttcactttcgacctgtgatggacacgtatatccagaagcactttgctggagctctggcatacaaggagctcatccgctgtttgaagtggtatatggactgctcagcagaactgattcgacaggaccacattcaagaagctatgcgggccttggagtaccttttcaagttcattgtacagtcacggatcctgtactcacgagccacttgtggaatggaagaggaacaattcagatccagtatccaagaacttttccagtccatccggtttgtgctcagtctggacagccgaaactcagaaacactcctttttactcaggctgcactcctcaattctttcccaaccatctttgatgagcttctgcaaatgttcaccgtgcaagaggtggcagagtttgtgagagggacactggggagcatgcccagcactgtgcacattgggcagtcaatggacgtggtcaagctgcagtccattgccaggacagtggatagccgcctgttttctttctcagaatcccgccgcatcctgcttcctgtggttctccatcacattcaccttcacctgaggcagcagaaagagctgctaatttgctcagggattcttggcagcatcttctccatcgtcaagaccagctctctggaggcagatgtcatggaggaagtagagatgatggtggagagcctcctggacgtgctcttgcagactctgctcaccatcatgagcaaatcgcacgctcaggaggcggtaagagggcagcggtgcccgcagtgcacagccgagatcactggcgagtatgtgtcctgccttctctcactgctccgccagatgtgtgacacccatttccagcacctcctggacaacttccagagcaaagatgaactcaaggaatttctgctgaagattttttgcgtgttccggaacctgatgaagatgagtgtcttccctcgggactggatggtaatgagactgctcacaagcaatattatagtcactactgtccagtacctgtcctctgcactgcacaagaatttcacagagactgactttgactttaaggtgtggaattcttactttagcctggcagttctattcataaatcagccaagccttcagctagaaattatcacctcagccaaaaggaagaagattctagataagtatggggacatgcgtgtaatgatggcctatgaactgttcagcatgtggcagaatttgggtgaacataagatccactttattccgggaatgattggtccttttctgggtgtgacactggtcccacagccagaagtacggaatatcatgattcccatctttcatgacatgatggactgggagcagagaaaaaatggcaacttcaaacaggtggaggccgagttgattgacaagctggacagcatggtgtcagaagggaaaggtgacgagagctacagggagctcttcagcctactaacccagctgtttgggccctaccccagcctgctggagaaggttgaacaagaaacatggcgcgagaccggcatttcctttgtgacctcagtcacccgcctcatggaacgtcttcttgactacagggactgcatgaaaggagaggaaacagagaataagaagataggctgcactgttaacctgatgaatttttacaaatctgagattaacaaggaagaaatgtatatccgctacatccataagctttgtgacatgcacttgcaggccgaaaactacacagaggccgcatttaccctgctcctttactgtgagctgctgcagtgggaggaccggccactacgggaattcctccactacccatcgcagacagagtggcagcggaaggagggactgtgccggaagatcattcactacttcaacaaaggcaagagctgggagtttgggatcccactgtgcagggagctggcgtgtcagtacgagagcctctatgattaccagagcctcagctggattcggaaaatggaggccagctactatgacaacattatggagcagcaacgcctggagcctgagttctttcgggtcggcttctatggcaggaagtttcctttctttcttcggaacaaagaatacgtgtgccgtggccatgactacgagaggctggaggccttccagcagaggatgctcagtgagtttccgcaggctgtcgccatgcagcaccccaaccatcctgatgacgccatcctacagtgcgatgcccagtacttgcagatctatgcagtgacgcccattccagattatgtggatgttctgcagatggatagggtaccagatcgagtcaagagcttctatcgcgtcaacaatgtgaggaagttccggtatgacaggccttttcacaaaggccccaaggacaaggagaatgaattcaagagcctgtggattgaacgtaccacactgaccctgacccacagcttgcctggcatctctcggtggtttgaagtggagaggagggaactggtggaggtgagccctctggagaatgccatccaagtggttgagaataagaaccaggagctacgctccctgatcagccagtatcaacacaagcaggtgcatggcaacattaacctgctaagcatgtgcctgaatggtgtcattgatgcagctgtcaatggaggcattgcacgctatcaggaggccttctttgataaagattacatcaacaagcacccaggagatgctgagaagatcacccagctcaaggagcttatgcaggagcaggttcatgtccttggagttgggctagcagttcatgagaagtttgtgcacccagaaatgcggcctctgcataagaagctaattgatcagttccagatgatgcgggccagtctctaccatgagtttccaggtttggataagctaagtcctgcatgttcaggcaccagcaccccacggggaaatgttctggcatcccatagccccatgagtccggagagcatcaagatgacccaccggcacagccccatgaacttgatgggcacaggccgccattcatcatcctctctctcctcacatgcgtctagtgaagcaggaaacatggtgatgctgggtgacggctccatgggtgatgctcctgaggacctgtaccaccacatgcagctcgcgtatcccaaccccaggtaccaaggctcagtcaccaacgtctctgttctgtcctcgtcccaggcaagcccttcttcctccagcctgagttccactcactcagcaccatcccagatgattacctctgccccttccagtgcccgaggctctccctctctgccagataagtaccgccatgcccgtgaaatgatgttgttgctgcccacataccgggaccgcccaagcagtgccatgtatccagcagccatcctggagaacggacagccgccgaatttccagcgagccctgttccagcaagtggtcggagcctgcaaaccctgcagtgatcccaatctgtctgtggctgaaaaaggtcattactccctacactttgacgccttccaccaccctctgggtgatacccccccagccctccctgcccggaccctgcgcaagtctcctctccaccctatcccagcctcccccacaagcccccagtcaggtctggacggcagcaactctacgctgtccggcagtgccagcagcggcgtgtcctccttgagtgagagtaactttgggcactcctcggaggccccacctcgcactgacaccatggactccatgccaagtcaggcctggaatgctgacgaagatcttgagccaccctacctccctgtccactacagcctctctgagtctgccgtcctggactccatcaaggcccagccatgccgaagccactcagccccagggtgcgtcatccctcaggaccccatggacccgcctgcgctgccgcccaagccctaccacccccgcctgccggccctggagcacgatgagggggtgctgctgcgtgaagagactgagaggcctcgaggcctgcaccgcaaggctccattgcctcctgggagcgctaaggaggagcaggcccgcatggcctgggagcacggccgaggggagcagtgaggggcaacgaggcggctgggatgccgccctcagtaagcagcttgccaatcactccaggtctgaaaagcaagtcccccagccccaccccagggagccagagaggcttgcactcaggagagaaccacccccaagtctccgttctactgccgtgaactcatgtgttgccatgtacagaggccacagcagcatgaagggttgtggcttccctttttatttttttacatttccatttctatgggttttcctttctttcctttatgcagtagatgctttcttcctcctgcagttctggaccatgtggagctacatggagaaattgcacagacagaatcactttgccacactgcagggcccaggagtgggagcccaggccctccctccagggtagagatgcaccgaatggaaattgcactaaggacctcttcctttgctgtatggacagaagagttcatggttgcattcagggattgcaaggaccatatagacatgtcacaggtggaaaaagggccacaagccgttttgcacaaatgcctgcccacctgcccctcttccatccaggagtgtgctactgaggggctggctggaccaacctgctggctcaggcatgtgactggcctaactgcatgcccagggcactgccagggttcaatgggccagccgtctcctactccaccttggatttttctctccatcacatcatttctgaccatttgctcccttccattcttgaaacacctcatgccccacaggagccccagtggtgactggatctgcaagggttatctcccgccctctggggtttgagtggaggtatggagccagagaggctatcctagctaccttcctcctagggggagctggtccccttcctatgtggtagagagactggtgtaagagtgtggggtgtggcaggcgccggaaatcctcaaagctttcagaagcatccagaatgcctaccatcagctcctgaatcagggattttcagcactacctctgagccatggggttggctgcccagccaggcttccaggccctgaggacatgtggtcaggttcagcaggctcctgggtaaagagggtgggagggggcttctccttttggaagcagatagccatgcaggtagaattgtcatctcccaagtggccacatacagcaacccactccaggccatggggaccaccactcagggttcggggctggcaggagggtagtttctccagtctccccagtctgttggtgtctttataggaaactataaagcagagcagtggtgtctttagaggaaactcattcaagtcagggcactgattttcctctcagtttattatttggggggatagggtcaggtgggtatagtagtactttaccagggtgcttttaagttactttaaaaaaagcctacaaaatattttttttcttttatttgctcgagttcacattaatgatggtcacaaggctgccttgttgggcaggcgtattgcccccagttcctcttctgctggcctgtatgacctccacagccaggccctgggcccaagccccttgtcccttctccactgcccctctttccagacagtaaaggccatggtcagtgtgtttttctcttgtaaacaaaccccagcttgtttaacagaaatgctaataacctactgggaaagatggaggtctaaattacctccagggtttttctgggggtttatcaccagtgtgggtcccttctgataccaccaggttcactccaggcagagtggggcggaaggctgctgaggatatgggtcagttacagcagccctcacctcaaagggctggcctgcttctcagcctacattcatttgcaagcttcaatctctggaccatctggtgttcacaggtgttagagggttaggggttaggggctagttttggatttgattcataggtaggagggcttagattttaaggcacttctgaaagtcaatccctggacaaggcagtcatcacataagaacagctaccttctccacttggtggcacaagaggtagggaggggagtatgggttcatttggcttcgcattatgcaaggtgaaaccgtttgttttccctctccattttccctaactaaatgaaaaggacacattctgaaatcccttttgttggagaataagtcagtctgaggggaaatgggaggccagagatgagaaccctttgaaaagattgtaaaatactgattttcattctttcaagcttatttgtaaatacctatttgaatgctgtgtatttgtacaggaatttgagcaaaaaatgtatagagtgtgatgtccaattggtattcagcactataaatgtgtttttaacctcc

SEQ ID NO: 21 - protein, 2030 aa, human
MWTPTEEEKYGVVICSFRGSVPQGLVLEIGETVQILEKCEGWYRGVSTKKPNVKGIFPANYIHLKKAIVSNRGQYETVVPLEDSIVTEVTATLQEWASLWKQLYVKHKVDLFYKLRHVMNELIDLRRQLLSGHLTQDQVREVKRHITVRLDWGNEHLGLDLVPRKDFEVVDSDQISVSDLYKMHLSSRQSVQQSTSQVDTMRPRHGETCRMPVPHHFFLSLKSFTYNTIGEDTDVFFSLYDMREGKQISERFLVRLNKNGGPRNPEKIERMCALFTDLSSKDMKRDLYIVAHVIRIGRMLLNDSKKGPPHLHYRRPYGCAVLSILDVLQSLTEVKEEKDFVLKVYTCNNESEWSQIHENIIRKSSAKYSAPSASHGLIISLQLLRGDMEQIRRENPMIFNRGLAITRKLGFPDVIMPGDIRNDLYLTLEKGDFERGGKSVQKNIEVTMYVLYADGEILKDCISLGSGEPNRSSYHSFVLYHSNSPRWGEIIKLPIPIDRFRGSHLRFEFRHCSTKDKGEKKLFGFAFSTLMRDDGTTLSDDIHELYVYKCDENSTFNNHALYLGLPCCKEDYNGCPNIPSSLIFQRSTKESFFISTQLSSTKLTQNVDLLALLKWKAFPDRIMDVLGRLRHVSGEEIVKFLQDILDTLFVILDDNTEKYGLLVFQSLVFIINLLRDIKYFHFRPVMDTYIQKHFAGALAYKELIRCLKWYMDCSAELIRQDHIQEAMRALEYLFKFIVQSRILYSRATCGMEEEQFRSSIQELFQSIRFVLSLDSRNSETLLFTQAALLNSFPTIFDELLQMFTVQEVAEFVRGTLGSMPSTVHIGQSMDVVKLQSIARTVDSRLFSFSESRRILLPVVLHHIHLHLRQQKELLICSGILGSIFSIVKTSSLEADVMEEVEMMVESLLDVLLQTLLTIMSKSHAQEAVRGQRCPQCTAEITGEYVSCLLSLLRQMCDTHFQHLLDNFQSKDELKEFLLKIFCVFRNLMKMSVFPRDWMVMRLLTSNIIVTTVQYLSSALHKNFTETDFDFKVWNSYFSLAVLFINQPSLQLEIITSAKRKKILDKYGDMRVMMAYELFSMWQNLGEHKIHFIPGMIGPFLGVTLVPQPEVRNIMIPIFHDMMDWEQRKNGNFKQVEAELIDKLDSMVSEGKGDESYRELFSLLTQLFGPYPSLLEKVEQETWRETGISFVTSVTRLMERLLDYRDCMKGEETENKKIGCTVNLMNFYKSEINKEEMYIRYIHKLCDMHLQAENYTEAAFTLLLYCELLQWEDRPLREFLHYPSQTEWQRKEGLCRKIIHYFNKGKSWEFGIPLCRELACQYESLYDYQSLSWIRKMEASYYDNIMEQQRLEPEFFRVGFYGRKFPFFLRNKEYVCRGHDYERLEAFQQRMLSEFPQAVAMQHPNHPDDAILQCDAQYLQIYAVTPIPDYVDVLQMDRVPDRVKSFYRVNNVRKFRYDRPFHKGPKDKENEFKSLWIERTTLTLTHSLPGISRWFEVERRELVEVSPLENAIQVVENKNQELRSLISQYQHKQVHGNINLLSMCLNGVIDAAVNGGIARYQEAFFDKDYINKHPGDAEKITQLKELMQEQVHVLGVGLAVHEKFVHPEMRPLHKKLIDQFQMMRASLYHEFPGLDKLSPACSGTSTPRGNVLASHSPMSPESIKMTHRHSPMNLMGTGRHSSSSLSSHASSEAGNMVMLGDGSMGDAPEDLYHHMQLAYPNPRYQGSVTNVSVLSSSQASPSSSSLSSTHSAPSQMITSAPSSARGSPSLPDKYRHAREMMLLLPTYRDRPSSAMYPAAILENGQPPNFQRALFQQVVGACKPCSDPNLSVAEKGHYSLHFDAFHHPLGDTPPALPARTLRKSPLHPIPASPTSPQSGLDGSNSTLSGSASSGVSSLSESNFGHSSEAPPRTDTMDSMPSQAWNADEDLEPPYLPVHYSLSESAVLDSIKAQPCRSHSAPGCVIPQDPMDPPALPPKPYHPRLPALEHDEGVLLREETERPRGLHRKAPLPPGSAKEEQARMAWEHGRGEQ

SEQ ID NO: 22 - DNA, 3543 bp, human
  CDS (125)..(2059)
aagtagcaactaaagtggcagtgtttcttctgaaattctcaggcagtcagactgtcttaggcaaatcttgataaaatagcctttatccaggtttttatctaaggaatcccaagaagactggggaatggagagacagtcaagggttatgtcagaaaaggatgagtatcagtttcaacatcagggagcggtggagctgcttgtcttcaattttttgctcatccttaccattttgacaatctggttatttaaaaatcatcgattccgcttcttgcatgaaactggaggagcaatggtgtatggccttataatgggactaattttacgatatgctacagcaccaactgatattgaaagtggaactgtctatgactgtgtaaaactaactttcagtccatcaactctgctggttaatatcactgaccaagtttatgaatataaatacaaaagagaaataagtcagcacaacatcaatcctcatcaaggaaatgctatacttgaaaagatgacatttgatccagaaatcttcttcaatgttttactgccaccaattatatttcatgcaggatatagtctaaagaagagacacttttttcaaaacttaggatctattttaacgtatgccttcttgggaactgccatctcctgcatcgtcatagggttaattatgtatggttttgtgaaggctatgatacatgctggccagctgaaaaatggagactttcatttcactgactgtttattttttggttcactgatgtctgctacagatccagtgacagtgctggccattttccatgaactgcacgtcgaccctgacctgtacacactcttgtttggagagagtgtgttgaatgatgcagtggccatagtccttacatattctatatccatttacagtcccaaggagaatccaaatgcatttgatgccgcagcattcttccagtctgtggggaatttcctgggaatcttcgctggctcatttgcaatggggtctgcgtatgccatcatcacagcactgttgaccaaatttaccaagctgtgtgagttcccgatgctggaaaccggcctgtttttcctgctttcttggagtgccttcctgtctgccgaggctgccggcctaacagggatagttgctgttctcttctgtggagtcacacaagcacattatacctacaacaatctgtcttcggattccaaaataagaactaaacagttgtttgaatttatgaactttttggcggagaacgtcatcttctgttacatgggcctggcactgttcacgttccagaatcatatctttaatgctctttttatacttggagcctttctagcaatttttgttgccagagcctgcaacatatatcccctctccttcctcctgaatctaggccgaaaacagaagatcccctggaactttcagcacatgatgatgttttcaggtttgcgaggagcgatcgcatttgccttagctattcggaacacagaatctcagcccaaacaaatgatgtttaccactacgctgctcctcgtgttcttcactgtctgggtatttggaggaggaacaacccccatgttgacttggcttcagatcagagttggcgtggacctggatgaaaatctgaaggaggacccctcctcacaacaccaggaagcaaataacttggataaaaacatgacgaaagcagagagtgctcggctcttcagaatgtggtatagctttgaccacaagtatctgaaaccaattttaacccactctggtcctccgctgactacaacattacctgaatggtgtggtccgatttccaggctgcttaccagtcctcaagcctatggggaacagctaaaagaggatgatgtggaatgcattgtaaaccaggatgaactagccataaattaccaggagcaagcctcctcaccctgcagtcctcctgcaaggctaggtctggaccagaaagcttcaccccagacgccaggcaaggaaaacatttatgagggagacctcggcctgggaggctatgaactcaagcttgagcaaactttgggtcaatcccagttgaattaattggcatgaagagtacagatgtaatcacaagtaatgcaagactcactgaggaatacaagccaagctgatgaggcagtacaggggagaggctggaaaacatattaagagcataaattggagagaatcaaagccttgtcacatggatcctctggtgcctgaagaaatgagattttattatccctctctattatgcaaatgaatttagttttttgacagcagccattctgattactggattggctggggtggggatggaggtatcaggagtctagctgctggaggatgggacagctgtgctgggtcttcagggcatttctgctgcgaatgcggctctccaggcccttcacttctattctggattttattccctccattaaggagagtttaaaaataaaagaaagcttctgagagtaaacattttgctcctaagctgaagggaatgcacagctatttagtaagtgataagtttcttattttgaggacttgactcccatttgctctcagtgaccccagggcagagcccagagaagtgttccgtacccactgctgatggtttcccagagcccacactgagttgaagaacctattgttcttcttggcatccttcttatgctacttctcccatcgctcaaaggggttgcctatggctgggtgtgccctgccctaaatgcagcaccactttcaagcttagtaggaccattccaagaaaaccaggtttcttctccccataccacgttgtgcctgaagaacaagccttcccgtccttgcctgcatgtgagtcacttcttggctgtgcagcaggtccccccctccccgcgatatgctggagggtaggattctgcagcctgtgttgctctctacctggcagcagactgtgcaggagccccaacctgtcctccaattccagcattcacagctgatgagcagtgcaggagcagggcgagaggaacagagccaatgatgtgtgggttacactgaggagccaaggacagggcctcaggtctcccccttacaaggcgtggctcatgggcctgcattccagagaccaacatgatagcttttaattcagctgcatgacctgtgccttttaagccataaagatacctcaagcctagcacctcttgaaatccagatgttcatattagactcgaaaaaataggctccaggcctaggtgcccaggctatgatgagtctgcttttgaaggaggtagggaatgacatcttccttggacccaaagcttaaaagtaatgtatgctttgctgaccactgtttgttaggccttaaacaacattcactgtggtggtatcaggcacactgctatgtgcatcaattatttttttgctttccaaacagaatctctggggcacaagttttacactcaagctaagtataactttgtcatttcaggtaaatatgacaagtggtggagcatgaagttttctaatttgacttaatcctaataaatttttgttacaaagta

SEQ ID NO: 23 - protein, 645 aa, human
MERQSRVMSEKDEYQFQHQGAVELLVFNFLLILTILTIWLFKNHRFRFLHETGGAMVYGLIMGLILRYATAPTDIESGTVYDCVKLTFSPSTLLVNITDQVYEYKYKREISQHNINPHQGNAILEKMTFDPEIFFNVLLPPIIFHAGYSLKKRHFFQNLGSILTYAFLGTAISCIVIGLIMYGFVKAMIHAGQLKNGDFHFTDCLFFGSLMSATDPVTVLAIFHELHVDPDLYTLLFGESVLNDAVAIVLTYSISIYSPKENPNAFDAAAFFQSVGNFLGIFAGSFAMGSAYAIITALLTKFTKLCEFPMLETGLFFLLSWSAFLSAEAAGLTGIVAVLFCGVTQAHYTYNNLSSDSKIRTKQLFEFMNFLAENVIFCYMGLALFTFQNHIFNALFILGAFLAIFVARACNIYPLSFLLNLGRKQKIPWNFQHMMMFSGLRGAIAFALAIRNTESQPKQMMFTTTLLLVFFTVWVFGGGTTPMLTWLQIRVGVDLDENLKEDPSSQHQEANNLDKNMTKAESARLFRMWYSFDHKYLKPILTHSGPPLTTTLPEWCGPISRLLTSPQAYGEQLKEDDVECIVNQDELAINYQEQASSPCSPPARLGLDQKASPQTPGKENIYEGDLGLGGYELKLEQTLGQSQLN
